United States Patent Application Publication US 2007/0054278 A1 - sequence listing, part 51

SEQ ID NO: 94948 - DNA, 28533 bp, Homo sapiens
  misc_feature (1)...(28533): n = A,T,C or G
agacaaggccagacagccagggttggggaccttgggctgggaacccagcagatgtgtctccccaacatccgggccccccatctcaccagagcaccggtgggtgcagctgtcccagcttatcatacccccctcccctcccccaaacacctgtcacagctccccgggagtgaggaggaagtgaaggctgaggggtcactgggaaggacccaggcctggcaaagaggaaacaaagagcccatgctttggtgagggaggggatgcccaccaccctgccacaccctccccaggaagcccctatcctgtttgtagtcagctgcattccagggctgggctagggtaggcaggcagcaccgggcaaacccactcctccaccctgccccccggggcctgagtcaccgtctgaacaaccagrgagtcatgggggtggagaagcagagcccagaaagcgggctagcctgcacgcacgccaagatggagctccaggctagcccacagaacagcccagccgcagccgtcctaccagaccagcaccttgtaaccacagtctaacccagcgggcaccaggcggtgagacctcctgccgctgccagcccaggatagcccccttgcctcttgcccaaggctcaggctaccccttgaggcgtctggaggacactaggcttgacctggggagtggcatgatggggggcagggtccgaggcaacggagaaggcagaagtgacttaggtcaggcaagaaagagtatatattgggggcgggagtgcagaggggaggggagcgcgcggggaagcaaagcgccctttgactccagtgacaggcgagctcacagtggagctgccaggcggaccggcgcgagaccgattttggggtgtcggcgcggggtgggaacacacctggcagtcgtagaggcgcgtgagctgctccaggatccactcctctaggttgaggcgcttccgtagctccttgcggtcatacttgacggtgaccttcccttggcgcctcactgggccctcatcgtccgccccgcccgggccctctcctgcggccccgggggggctctgaaagtagacgcgtggtcctgggccgccactgccyggcccgggggccggggccgccaacgccgcgccccccgcggtgccgctgtccgccatggcggccgccggggccacgtgcgagcgtcgggcccctccctgcgccaccgcctccggggacgcccgccggctggctcgggttagctcgccggcgtccgctccgcgcggctccgcggcgagggcggcggcgggggcgcccgggggcagctgcagcattgcggagcccccgggcttggcctggccgcgccccgccccctccccgccgatccgcccgccctttgtcccccgcggccgccgcccgagctgcagccgccgaagcgctttctctgtctcgctcttcctccgccccccgaccacacccccttaaagggccagcccctctacaggcccctctcccctactccgcccccgggcaggggtaggggagggtctattcggcagggggtggcctagctgtccgtactccccaaacgcaaccttccagtcccaaacccaggcgttctaagcgctcaggacgacgatttgcgctcacgccaggaccctagtcttcattggacccttcctcattctgtcctcattgaggccatctgagaataggggctatctgagaatgcaggggagtggacatcgtgtgcagacagggagtctggtgaggagacgctgcggtccccgatgtccaggtcctccagccctcggccagcgaggagcgaacgggctcctccgcacggaccgacacgtggactgggctcctgggaaaggaagagtggagaaggcgggcaggagctgtccgggtccctagactctccgagtagcaggtcccacgcccccagcggaagaagccggggctgggggtgagcggtggcacccggccggcccaaacggccaaccccgggcagccaccgcccaccggcaagatggcgcgaggctcgggcttgtgggaaacggagtccgctcccggcgccgcccctcccccgccctgcggccaggccgggaagcgcaaagttgtttggggcgtcctctgcgcctcgcgacccgagtgcgcacagagggggaaactaaggcgcaaagagctgggcagtgcgggggccgcgacttataataataaaggcggtaattgcggctgaccctaggagcgtgcgtcgggaccgccgcccagtcggctccgcagagagggcgccgtgccggggctcctgcacccccgccctgcggctcctcggtccttcacatagccctggcccacctccaataagccgacggcgcatcccattccctccctctattttattttctgcatctttaaatggtctcattcattcgtgtattgtctgtctcccacttctagattgtgagtgccacggggctgaggcctgcgccgacctggtctgctggtgctaccaggcttgaacagtcttcaaatccactgctattaggcaaattacctggctcccgctgaactccagcacctagaactatgtcacactcgtagtaggccgctgcattggttgaacaaatgattttgaaagaatgaatgtcttcctctgtgcctgcatttcctcagaaggctgtaacaaagattaaataggaaaattcgtggaaagttcaattactacaccacagaggttaattaagtcgcactgctagataaaacgggagacgagactttgaacccaggctgtgtggctcaaaccccctgacacgaagtctctactcaacctcctcactaccctgtagacaccacccaataaggctgcgcagctcccgggggatgtttctgtggaaggcaggctcaccttgtgccaccccaaacagggtcttggatctgagaggcaatgtttctgctccagcccctcaaagacactctttggatgttgtggggggaagccctctgcagcgggtggggttcagagatggattgggattggccccggggtcacacagctggggctgcatccaaactccaacccaggatgttgggctcctcctttgccctatagtcagagagaagagaccaagagaagacagaggctgggcattgtgaaggcaatgggctcacagggctcagttcagggaagggtagagtgagctgacccctccccttcccgtgcccctcctccggcctcagcctcccttcagccagtctgggtgccgaggaagggctgaccctcgctcttgcggattaggtaggatccaccctctccaccgggagccctatccgtggcctggcctcctgccctaagcctggcctgataggaggatcactttaccccagtccaaattccccaccacaccccaccaggccaggccagctccctctgaacccaagcattgtttgtaccttgagggtgcacacagattaaagggggaagaccctcaaacagcccctaatgcccaacagcttctgtggaagtggggcctgcaggccatgaagacccccagccctagctctgcccccaagatgctgtgaccctgagccctgacctttctgtctgtcctccctcagggttggtgtgaaggtctccagccatgtccgtgtccacaggtcaggcattctttctgactctccctcttccccccaccgcgccatgcccaggsacacccagattcctgtccagttcccatggctatccacccgagaccacttggtgcaggtgggcatgctggyctgccaccttcttggaagctgggccacagaaccttagccttggagtagaaatactgggttcaaatcctggctctgccccatgggctgagaggctgtatgcaagtcacttacctgctcagagcctcttcagggggcttatggtcctgacctcctgtggttgggggcccatgcccagccctggccctcctgcmtgagccctactgggactggagtgtaccactgctcctcctccttctagcctcagtctgtggcctccccagccctaccccttccagggccccagcccccctccattagagtgcatccttgaagcagaggctctggggagggtcctgtgggtcaagaccgctccttcaatcaagggtagagtccggaaaggctgcctgccttcaccattactgcctgstgagataccctattaccattaccaaggatggaagaaagtgtctgggaaggaaggagccctgtaatgggggctgccctggcctccagagacacagggttgggggaggagagaggcttaagcccaggaaacaggtgcccatcctgtttttttccacaaggagctgctgcccaatgcttctctaaagtacgcttgcacaaggcctagggcccacagctcagatcccctaagctcaggccttggctccaggctttgctagccctggcacaagctggaggttccactgccccagagctgacctatgccctttcctccctccctggtatacccacagcttccagctactcatgtcaatttggcatctcccacccatttgcttatgtatacaacaacctttaggttctggacaaggtgactgaggcacctagagagactaggttctgccactagcaagaggctgctagcaagagccggatttgaactccagcctgtgagggcagaggccaagctccaccttgcatggttctgttttcccaatgaggtctagaggctcctgggcctcaggaagtcggagggttgaaatcctcctaagaagctgtgtgaccttgggcaagtcccttcccctctctgggcctcaagtggagatcataatcacaccccacagggccagggctgagagcgaggagatccgccaggttagagttgatggagaacttggcggggtgtggaggaagrccagggccaggcagggctccttgtggaggtctcagascctggggcaaaggggcctscaggggagctcctcctttgctgacccctcctcccccagagccagctgcatctctttctgggtttctaggtgacttggctggcccctctggatgagttctactttaaacctgctgctgttactgcctctgtattgggggggctcccacagggscccccaggcaggaaccccccccaccagctaagccctgcgggaggggctgcagcccccacccatcccattgcccatgcgccttccccgctcccatctctggaacgcagatttcagggcacctgctgtgggccaggcactgcagagcccctcctcaaccctcctgtctggggacatccacaaagcttctgacccctctgggcagacaacagcgttccccccgcggttcccagccaagaggctcacagtcaggctccagtcatgggagtctgcagcaacaagaagggggctgttctagggctcactctcgaagaccaggatgcttgggtccttaaaggaggtggcaggcgcccggcctccctgggctagggacgggggaggggtgcctgccggcgggaggtccattagccggctaagtgctcccagggaggggggaccgcgcggcataagagtgggtgaggcgaagccagggcagaggggggcggaagaagcttttcctgcattcagctaagtgcggcagaagagggtgggcgacagggctgtgcagcgaccccccggcccaagtctagccctccgctggtactgcagccctagtcgctmggaaacctcagtgggctgatcccggaccgccttaagcagcgccctctacacccagtccctccagctgctccccaacagccacttcggcccccagcgccctccttccaccacaggcctgaagaatcaggttctgctgagccccgcagcaaagcccccgacccgtccgcgtgcccctgccccaatccccgctccggctgcagtcgccgccccggccgccagggggagccgacgcggtgggagggggcggggcccgggaggccccgccccgtccccgccccgcccgggccccgccgaggctctggtcggtccgggacagactggcgggcgggcgggcactgacgccgcggggccggagcgggccgcgcggtgggagcagcggcgccgtcggtccccgtcagggctccgtgggtccccgacccgcccctggccgggccatggcgggcgcccagcccggcgtccacgcgctgcagttggagccgcccaccgtggtggagaccctgcggcgcgggagtaagttcatcaaatgggacgaggtaagcgcgcgggcccctgctccgcccaaatcccgggactctttcagtcaagctcgaccagacgctggggacccccaccccagcctcgcctgcccgtggcgccaccctcatcccagtctggcggcgccccggaaacttaagtccccgatcgtctccgtaatgaagactttgtccccccaactcccagtccctcagctctggaaaatttgcctccactccttggcgcagagactttgaaccccaataaaccccgtccccccgttttccattcgttcttcccaccgctccctgccagactaattctcgttccccgatcctggcctggtgcccagacccctgcccagcactagactccccggctgcaggaccctgacttccaggctggctgggggcatcctcattctgggtgtgtgccagggcgcccctactctccccggtgccctgcctgaacagtcctcgtccattcatcatttttccccctgttctggttggcaccccttcgccctgcttctggatcccagcccagctccctgttcagatgggagcacccagtcaccccctagtggagactttgscccccaagttcctccacccctgggaactttgctccccactccttaggcttgggaccttgaaccccaatacatcctggcccccctttccctgtcctgcccctggtgcttcccaaatgcctgtgtccccaccttcggctgcccatccccatcctgggtgcatcctcttctgccccctgggcccttccttccctagggcctccacccggccggcctgagcttcctcgcagctccttcccagtcaggccacgggcctggaagactctgggctcttttccggctgggtggggccccggggtaggcgtgggagctggggggaggagatgggggcgtggcctgaagcggcaggtgtgcgaggtggggtgcctgggggccccaggggccgggggagacccctccccccaggctgkcctgaagggaaaagtttcttcttttcattccactgtgataaacccaaataaggaagtgggaacagggagaggsccctgggggtggggtggggggtgctgacggaggcttggggcaggagagcaggggacctgggctgcctttgaggtccagacccctggggagaggtgggagggaaacactaggggcagtacccatagactcccckctctgcacaccattcggggscctcaggcccagggtagggttgggaatccggagaagtgctggggctgggtgtcagcacactgaagtggggaggcccatgcatccccaaattttgggggccttctgttcccagatgaacgcccatcttttgtaagcaaagcctgccatgggtggggctggtgcaatccccattctccagaagaggaaactgaggtctggaaagcagagagttatcccagsccccacaatggggtgtgkctgaggccaggagccgggagcctggcagaagtctccgctccctgcttcccaggtcacaggacgctrcaaccacactgcctgcaagcaggtcctggctccagtgatctcgggcaggctacgaagtgtccctgtaactcagtgtcctcayctgtaaaatgggagtgacaacagcacatrcctcttaggctggttaggaggcctttgtgtgctcgaagatgctaggtgcatagaactgtacctggtgcgcagtaggggcggtgtgcgtatatgagatgtattgataataatagtattgtccaccagacactgagatgcattttgggggtggcacccaacatgaggtggggtccttttctgtctggaagaacctggaataggagggttctacctgtagccacttgttcactctggccctggccgagtctaagccctggaggacagcccctctggctgctggtcctgagtcacacagggtggccctggtagtgtgccagggaccgggcccttcttagaaaatggggctggcatgcacttccctgccccctgccagctgcacggctgtttgagggaggaagagctcactgcccagtcctgagagtagggcaagtccccttctagggggactgttcttctacgagatggggatgagctttgagkctgtgaggaccccggcagatgtggtaaggtggataatgggctttgaggcagaccacagggctatcgtgatgtcccaagggatgcagaagggcagtgggagtcagacttctcactttcatgccttaaacattctkcagtggggtggattgggggsctsccactgtcacagagctctcagcacttctggggaaactgagcccaggatggggsctggggacctcttccagggggtgggtcagatttcacgggtggagaaggaagggcagggtgtcctggcaaagggaacatgagacaaasccctgggaaaggtcaggtagaatcctagggccagagggaggtgaggctgggargaggctttgaggtaggtgtgacactaaatgtcacacctaggaccttggctttgttctgagggccacaggcagccacacaggacctgtggactggatgaggtttcgtcttagctcatgggcaggaactctggggtgcatgatgggarggycccaggggccaggcctgcaccacwgccctcacttcctgacccctgctgccctgtgctgtcctcaggagacctccagtcggaacctggtgaccctgcgtgtggaccccaatggcttcttcttgtactggacgggccccaacatggtgagggtgggcgctggtgcagctcgctcaggccaaggacccctgtcccagacccctgccctgcccgtgggggtggggcccggctgcaggctgacctctcccactgctgcccagacaggaagtgctcagggcaggagctgaggctggggctatagccaggggctggccattccctggcctgggtagagagcttggaagctcctggctattgccctgcagcctctcatactcagcctggcatctggttccccccaggaggtggacacactggacatcagttccatcagggacacacggacaggccggtacgcccgcctgcccaaggtgagtgatgagcctgggagtgaagaccacagcgagrctgtgcgggagccccctcttcacccttcgctgtcacctactcaggaccccaagatccgggaagttctgggctttgggggtcccgatgcccggctggaggagaagctgatgacggtggtgtctgggccagacccrgtgaacacagtgttcttgaacttcatggccgtgcaggatgacacagccaaggtgggctggcaccaaggggacgaagggggagtcactgtcttattctgtgagtcggccgtcacttaccgaacacctgctgtgttctaggctgctctgtgacctactgtgtaccagaggcagttgtggacctgggttgtggctgggcagcccctgtgtcccccactcacygcctccccgtgtatactggccccccaggtctggtctgaggagctattcaagctggctatgaacatcctggctcagaacgcctcccggaacaccttcctgcgcaaagcgtgagccccaggccacccgagggggagcsggggggttcacgtggccgttttcagggtgtgacctcttcatctgccttcccagatacacgaagctgaagctgcaggtgaaccaggatggtcggatccccgtcaagaagtgagcaccccttcccccagcaccttcctcctgccctgaccttggtgacctttgtcctccactgaccctgaacccctcctgcccgcatcagcatcctgaagatgttctcagcagacaagaagcgggtggagactgcgctggaatcctgtggcctcaaattcaaccgggtgtgtggggtggggacaggggcggggtggggtgtcacggtggrcacccacccttacggggstgcccgcccctggyttctcaccccacactcctcgacctccagagtgagtccatccggcctgatgagttttccttggaaatctttgagcggttcctgaacaagctgtgtctgcggccggayattgacaagatcctgctggagatgtgagtgggcccggcctgcctcacaacccctgtgctctgtgtttagcttctgcttagcgtgcctctagctcaatggggagaggggaaactggtgggccgggtcctggagcgccagggggcggaggggtgcccagggagaacctgtcggtgatgttcctgtactcagacccgccgtttctgcccctcagttacaggcagctctgggctaaccctgtgccagggttggkttaatcagcccactctkcaatggggtccaagcctcaggtgtgttgtgaggtctggaarcgaggggtggtgggctgaccacttggcagctcctaarccctggccattgctggtgcccactagtctgctgccttgacaatcctgagtagtcaggagagtaaagggggaaactgaggcccagaggttggccatgactcacccagagtcccactcactgggtgccagatccagggscaggccttctgactcccttgcccagggcaagggcttggcgacggggtggragccctgccaggctccatcctgacccagcttcctgtcccctccagaggcgccaagggcaagccatacctgacgctggagcagctcatggacttcatcaaccrgaagcaacgcgacccgagactcaacgaagtgctgtacccgcccctgcggccctcccaggcccggctrctcatcgaaaagtatgagcccaaccagcagtttctggagcgaggtgagctggctggggtgcaggtgggtgggggcasgtgggacnccagctgaccctgctgatcctctcccaccccagaccagatgtccatggagggctttagccgctacctgggaggcgaggagaatggcatcctgcccctggaagccctggatctgagcacggacatgacccagccactgagtgcctacttcatcaactcctcgcataacacctatctcactggtgagtggggagcaagggtggcacccgtgacctctgccctgtgacccttgsacagccccactcctcctggggsacagtccttttggcccatttgctcattcattggccagtgctggggatgcaggcagggaacaggcagccagccctgagcagtggggcctcatggtggctttcccagggaagggctggaacagcttgtgttagggcctgcagcaggagagacttcagggtcctttttttttttttttttttttttgagacagagtttcgctcttgttgcccaggctggagtgcaatggcacgatctaggctcagcgcaacctctgcctcccaggttcaagcgattctcctgcctcagcctcccaagtagctgggattacaggcattcgccaccacgcccggctaattttgtatttttagtagagatggggtttctccatgttggtcaggctggtctcaaactctcaacctcaggtgatccgcctgcctcgccctcccaaagtgctgggattataggcatgagccacctcgcccagcctgcagggtgcttttaagaggctggaagggggttgggtgcggtgactcatgcctgtaatcccagaactttgggaggctgaagcaggcagattacttgagcccacgttttgagaccagtctgggcaacatagcatgaccccatctctacaaataatttttaaaaaattagctgggcatagtggcgcatgcctgtggtcctagctgcttgggagggtgaggtgggagtatcgcttggttctgggaaggttgaggcaggagtaagctgtgattgcaccactgcactccagcctgggtgacagagtgagagacccttttctaaaaaaaaaaattaaataaataataaaaaagcagaaaggaagctggtgcggcagggtgcagagtgctggagataggtgcctgctaagagagggagagcaaggcagggctaagcccaggggcctagaggcacttggattcatcctgggtgtgaggaagaggctttttggagggtgaagcagaagaggtgatgtgacctgatatgatatgtttttagaaggatgatgccaggtgctctatagagattggattgaggccaggcacagtggttcacacctgtaatcccagaactttgaaaggctgaggcgtgtggatcacctgaggtcaggagttcgagaccagcctggccaacatggtgaaaccccatctctactaaaaawacmaaaattagccaggcatggtggtgggcaactgtaatcccagctactcgggaggctgaggcaggagaatcgcttgaaccagggaggcggaggttkcagtgaaccgaggttgtkccactgcactccarcctgggtgacagagcgaggttccgtctcaaaaaaaaaaaaaaaagagattggattggaggcagggagggctggagtcttccacacaggaggtggtgtgagctgtsccaggrctgaggtgggtggagggagtgaggagagggagggattgttgaggcagtggggagctatagtgagtctcagggatgactccccccagctcacgctggtgggatggacaggtggtgggtatccatctgagagatggagagccctctscaaatccagcatgtcctggttccaggtgggrccggggtggtgaggagctgggctggtgggcggcctcggtgacagagcctcgccgccccagcggggcagctggctgggacctcgtcggtggagatgtaccgccaggcactactatggggctgccgctgcgtggagctggacgtgtggaagggacggccgcctgaggaggaacccttcattacccacggcttcaccatgaccacagaggtgcctctgcgcgacgtgctggaggccattgccgagactgccttcaagacctcrccctaccccgtcatcctctccttcgagaaccatgtggactcgtgagtgagcccctggcatgaaaccccatggacngggggacagtcttccagcttcagtgctgttggactgctcagggacctccaaccctgcgaacggccactgacatgtcccgtagacctcagcttcctctctgggggagggatctctgacctctgacctcggttccgcagggcaaagcaacaggcaaagatggctgagtactgccgctccatctttggagacgcgctactcatcgagcctctggacaagtacccggtacgggagctcggagcgaggggggtggcatgggggccagggtgctgcggacccggtccagggccctgactcgtccatgcctgcccagctggccccaggcgttcccctgcccagcccccaggacctgatgggccgtatcctggtgaagaacaagaagcggcaccgacccagcgcaggtggcccagacagcgccgggcgcaagcggcccctggagcagagcaattctgccctgagcgagagctccgcggccaccgagccctcctccccgcagctgggtaggccccagcccggcccgccaccctgacttgaccctagcctctggcctcatgytccaggcgccgtgacacttcatcccagacccccagcccaccctcctgcctcgctgtgcgcctgttcccacaacyggcctgtctcctcaccacctgtcggytggtgtggggcctctgacccctgacctcaggtgcacgtctcacccagctgcaccccaactcctgactcccaacctcagcctctcacctctcagagccttcccacaacccggtgatggctctgaaggctgacctctgacctcagtaaaccacatcccacactgggtgtgacctcagacccctaagcccgcattgagttcacctgcccagttggttatcatttcagctgacctctgacctctcacccctgactgttcacctcactatgccccctccttagacatggctctgacttacccctgacctgtaacctctctatgtcatcccttaccccgctattagggctgtggtatgctacttcctgacttctcaccccactgaaccaccctatctgcctccctgctgaatatcactgcagacctttacctttgacctatgacccctctcaacccatactgggttaataccatctgacctcgacctcttggcctctccccaagccacactgcyctgagagtaccccttgaattccccactgagtcacctcggcacacactgggaaaaacccctccagacttcctaagcagctgtgtggtccygacccctcaccctgtggccctgtcctctgcagggtctcccagctctgacagctgcccaggcctgagcaatggggaggaggtagggcttgagaagcccagcctggagcctcagaagtctctgggtgacgagggcctgaaccgaggcccctatgttcttggacctgctgaccgtgaggatgaggaggaagatgaggaagaggaggaacagacagaccccaaaaagccaactacagatgaggtcaggcccacagggtgggcaggtcggggaggtagcatctatttacctcccagggggctgggtctraccatcaacaagactgacatcacccctgcctcctggggctcagtgtgggtgtgagtgaaggtgggaggagggctcttcagtcatcaggcatggaaacaagcatacagttctgctgrtgatgtggcctgggaggtgcgagttagggtacagaactggcagaggatagggagtctaccctgggcagggaggtggggcagggagacctcaggaagggggacagcatgtacaaaggtcctggggcagggccagggggtgcaggagcggkgagcattgtcatggggagcattgagtagctgtgaggaatggtacagaaaaaatcagtctgagctgggcgtggtggctcacacctgtgatcccagctactcgggaggctgaggcatgagaatcccttgaacctgggaggtggaggttgcagtgagctgagattgcaccattgcactccaacgtgggctaaaaagggagacactatctcaaaaaaaaaaaaaaaaaaaaaaaagacatcattgctataaagacaattactggagcaattagtgaaatttaaagatggrctacatattagataatatgttaatgttttgtttcctgaatttaattattgtattggagttatagaagagaatgtccatatatgctgaagtatttatgggtaaagggtcatgatgtctataatttactcccaaatgattcagtaaaagtaatgataattrtaacacctatatgggccaggcgaggtggctcatrcctgtaatcccakcactttgggaggctgaggtgggcgagtcacctgaggttgggaggttccagaccagcctggccaacatggtgaaaccccatctctactaaaaatacataaattakccgggcaaggtggcgggcgcctgtaatcccagctacttgggaggctgaggcaggaaaattgcttgagctgggtggtgtccagggcgcatcagtgagaccccggggagaagactgtcggcaccaccagcagtgtgtatatagtgctgggaagagggtcagcacctccttcatggggggcaggtgagggaatggccagctgtggcgggaatggcactgctgaccctgggttggggcccacagggcacagccagcagcgaggtgaatgccactgaggagatgtccacgcttgtcaactacatcgaacctgtcaagttcaagtcctttgaggctgctcgaagtgagtgggggtgggtggcaggcatgggagcttgcccagctcagccctgccaggtctgacgccctttcttggctcacccctaagagaggaacaaatgcttcgagatgtcgtcctttgtggagaccaaggccatggagcaactgaccaagagccccatggagtttgtggagtatcctttgaaggtgctgtgggcggrcaggccagggtggggcgctcggaggccggctccggtgttctrtccccacatatrccacctgcacagggtgctggccctccggcggccctcctgcaccctggcctggggcttgggcagatccaggcagtctcagggggcatggctaggctaagaaacagaggccgggtgtgggggtcacaggagcacctggctgaggccggaggtggaggctgatggggtgggccctggcacctgtgtggcccctgaccaccaatctcagatacaacaagcagcagctcagccgcatctaccccaagggcacccgcgtggactcctccaactacatgccccagctcttctggaacgtagggtgccagcttgttgcgctcaacttccagaccctcggtgagccctggccccctccatcttgaccccgaccctcagtcttactgacttctgacccacgatcctgctggtcttgcctgaatggacctctgaccctgtctcatcccagatcccaggggaacccagctcccgactcaccccgcctcctgcccttggctgataccagacccctcccctgtctgatctgtcctggatccggaccctgatgccatttgagcccgcccctgaccctggaccttggatgccatctgacctgatgatctcccattccccacatggcaccgtcctgcctgatccctgcccctgctcgacgtgcccgtggcaccccagatgtggcgatgcagctcaacgcgggcgtttttgagtacaacgggcgcagcgggtacctgctcaagccggagttcatgcggcggccggacaagtccttcgaccccttcactgaggtcatcgtggatggcatcgtggccaatgccttgcgggtcaaggtggggcttgcgggcggctcargccaggggtgtcctgggggcaggactctcagcatccgcctcaccctccttggcccacccccaggtgatctcagggcagttcctgtccgacaggaaggtgggcatctacgtggaggtggacatgtttggcctccctgttgatacgcggcgcaagtaccgcacccggacctctcaggggaactcgttcaaccccgtgtgggacgaagagcccttcgacttccccaaggtgagcctggcccctgcacccgcccaggcacaggcagatccagcccagaccgccccgactctcaggtgggagaacaggaaccaggcacaccgttggcgactggggatcagaaagtggggggtgccatgggtcccccaggacctgcctgtccgagcgtcagtctccctgccctccttagggtaagagaccagggtgagaaggtgagatkggggttggggggtgtcagctagacgtcttgtgtcccctscgaggagtggacacagcctaccctgtctccgaggcaggagctgaggtcacaaccccaagctcatatccgctcttcagcaccccgcacggccctgcatggacgcggcctctgytcccagcctgggcatgtgtgttcttggtttcctgctcatgactcactcccgtttctaaactggcaatgaccagaactgtctgtgggggccctggaggggcctggctgcctgtcatcttgcctcagggtcctgatggctgcagtcatccattaggccaggacatggaagtggggtcagccatcagcttagtggcaatggtgactgatggtcagtaggtcagctcgtctgaaggtctgctttgttaagctttgatggctgtggttagctgtggcctggtagccacagtggcccagggtcagccctgnggctcagctccagtctggcccacaggtggtgctgcccacgctggcttcacttcgcattgcagcctttgaggaggggggtaaattcgtagggcaccggatcctgcctgtctctgccatccgctccggtgaggccttggtgggctctgggcagcacagcgggcagtgggtagggcccccacctggcccagcaacccaacgttgccttcctgaccacccaggataccactacgtctgcctgcggaacgaggccaaccaaccgctgtgcctgccggccctgctcatctacaccgaagcctyggactacattcctgacgaccaccagggtgagctgggggtgggcggggcctgcctggccagggagtgtgagggacaagggccacccccagggcctgggagtggccgagctggatggccccgactgagtagggaactgagtagggaacagatctgaggacaagctctggaattcctcattgagaccagaggtggcgggtgggggtggcctgggggctctgtctctgagaccttggccttctgcctccccccagactatgcggaggccctgatcaaccccattaagcacgtcagcctgatggaccagagggcccggcagctggccgccctcattggggagagtgaggtgagccggggcagggcagggctcaggctcactgtgacccagggggccgctggacatgactgctgtggccacatgaggagggggcttctggtctctctagcgcagtaggcttggcagccctgggattttgaggagatgaaaaccacccatttgcattcaggaggccttcaggtcacacctgggctggaattcctccagctccatgtaggcttgsagtgggggtacaggggtctcagccacttcatcagggcagtgcgaagccacagaagctgttcagacgtggtgtcctgggagtcatgaggagggcagtggcttccgtggggaggggtcaggcacggaggttcacctgcgcttccagatccagtccccccagggcctgcggcaggcgggcggggagagatgactgcaattagggctgcctggagctgttagcggagaggctggtgcccactctgcggttgagtcctctgttgatttaatcaggagctcagcagcaaggaaaatgagcgactgtaggcaaggctgggggacacaggcaggggaggagaggaggcttggggctgggccaggcctttccagaacaatctgggagttactgagcacatgcagtgggctggcattatgttatcttccccacagcccatgtggaaaaggggtttagaaaggcttgatttatagctcttctcatgcagacagcctcctgttacagagcagtccagcagtggcttggactaagggaggctgacaggggtgctaggggacccaggaggtggtagaggacagaagggtctggagggaacagcatttctgaaaagagcattctcctttctccctataggctcaggctggccaagagacgtgccaggacacccagtctcagcagctggggtctcagccgtcctcaaaccccacccccagcccactggatgcctccccccgccggccccctggccccaccacctcccctgccagcacctccctcagcagcccaggtaaggagtggcctgggtcgggggtgggytgcagggaggcaccccccaccctgtcctccagctcctcacagggcctctgctccccagggcagcgtgatgatctcatcgccagcatcctctcaggtagggggcggggtacctggaggcagggggytgccttgsaggttcccccaccccccgcccacctttgstctgccgctcccagaggtggcccccaccccgctggatgagctccgaggtcacaaggctctggtcaagctccggagccggcaagagcgagacctgcgggagctgcgcaagaagcatcagcggaaggcagtcaccctcacccgccgcctgctggatggcctggctcaggcacaggctgagggcaggtgccggctgcggccaggtgccctgtgagtgtctgggccgcctgtgtgctatgtgtgctgggtgtgctgatgtgaacatgggggtcggtgggcatggagagatggcaagagctgctccttgacccccagggaggagggttcagtgcaaggatggaggaggctttccacaccaggcgtccctgtgtcccccagggagtgacatctcttttgaagtccatgaggagcatgttgcccaaacaggctcccatcacttgggtggagctaacaggcctcctggtttgcataacagacctggccccatgggatggtgtctgccatcgcttgccaggatgtgcccccctacacaccmtccccatcccagtccatgtgacgggcccaggcatcacccagaggggttctcytcgcagaggtggggccgctgatgtggaggacacgaaggagggggaggacgaggcaaagcggtatcaggagttccagaacagacaggtgcagagcctgctggarctgcgggaggcccaggtggacgcagaggcccagcggaggctggaacacctgagacaggtagggggcctgcagtggccagggaaagcctgctggatagaccngtcgtcagcccggcatcacctgtcagctccctgtgtccacaggctctgcagcggctcagggaggtcgtccttgatgcaaacacaactcagttcaagaggctgaaagagatgaacgagaggtgaaagccgaggattgtctatgggaagggctggggacttctagtaccagaaggagggcagagtctgtgcttcygccgctgacccctcctcttcccctgccggcttctccagggagaagaaggagctgcagaagatcctggacagaaagcgccataacagcatctcggaggccaagatgagggacaagcataagaaggaggcgtaagggcaccgggaccgggggccatctgggtactggggaggcagggcaggtgtctgggccccgagccatcctgcgttgctcccgtgcagggaactgacggagattaaccgtcggcacatcactgagtcagtcaactccatccgtcgggtgagtcaggctcccgggccaccctaccccacctcccttccttcactcatcagacacccatctccatgcctggcctggtgccacgttgscctcaaggttcttctagggcctttctcaagtgcccaacagccccagggtacccacatcatacccaaagccaactgtctgtaccagtgtccctggctttggsgtccttgggcccagtcctctcacaaccctgatacattgscctgggagscttcgcccacctgacttctttttctttgagacagagtctcactctgtcgcccaggctggagtgcagtggcgcgatcttggctcactgcaacctcttgggttcaagcaattctcttgcctcagcctcccgagtagctgggattacaggcatccgccaccatgcctggctaatttttttatttttagtagagatggggtttcaccatgttggccaggctgttctcgaactcctgacctcaggtgatccgcccgccttggcctcccaaagtgctgggattatagatgtgagccactgcacccggcctcgcccacctgacttctatacccagccagagcctcgaggctctagcccctccctcagggcccctcagctgagcccttgcccacscctgtagctggaggaggcccagaagcagcggcatgaccgtcttgtggctgggcagcagcaggtcctgcaacagctggcagaagaggagcccaaggtgaggccatgggcgaacaggtgggcagayggkgtgcaaggcagccaggcctcgcctgtgatgcccatccttctcccacagctgctggcccagctggcccaggagtgtcaggagcagcgggcraggctcccccaggagatccgccggagcctgctgggcgagatgccggaggggctgggggacgggcctctggtggcctgtgccagcaacggtcacgcacccgggagcagcgggcacctgtcgggcgctgactcggagagccaggaggagaacacgcagctctgaactggctgagcgaggtggccacagggccagggcgggcgctgggtggagggcaggaggcaatgacactaatgctttttttttttttttttaactttttatctagaaattttatttttttaaacccggggcaagtacctcagctaactcccttcatcctcctggggcccctccttcctgccctcagtcttaggttagggccttggtcagggctttgctccctgtgacacccacaccctcgagctagcagcgtctcctcccttccccgggagagctggctggagacttggagctccgggaagtaggagtcacatttttttctctattctttggggattttttttacatgaataaaagtggatttcagggaccctgtgtgcagtgtgatttggggtgacaggactctgggccctaagtttcctcatctataaaatggactttgggcatttggtggggttgaggtcacgcctccagccaagggctgctgggttgaacctgagcttgccctgccgagtctgctgagcttccgtggccttctgcttgtgccctctgcccccaagccgctgttcctgttcccccatccccatgactttcgtctctccgaggctctccctgttctctcttttctgaggctcaggcctctgcttcaggaagccttccctgccccgcttcctgtggcctgatatgacccaaacgcctagyatcttccgctggggctgctctgggcccccgacaggcagttgactctatcaggtgatggatcggccagggtggagcagggcagctcagaacctgcccaacaccgggggacctgggtcttcagaaataggtgggcagtaggcctgcctgtgactctgggggaagggaagtggacagtcacagacacgcaggggctgggccacccagcatcccctcatccctgtgagggagatgttatgcctgttttacagatgaggagactgaggcccggagccatctgtcgtgtgctaggccacagctaagtcaagacgtcctgacctggaggcagggcaggcctggaccctccgtggtggactgtcttcagccagcctggacctgtcccatgcctcaagaccagcgaaaagtggcagagagcccacagtgcgggctccagggcggggctgggctcgcagcagggtcggcttggcacctcttcaaggcctctcccagcttcctggctcttcccaggctgcccgcctgcatccctcctccaggggaaggcggcctcttatctgggcttatctcctgccaattgagtatcttctttgctttgtttttgctgcagcctcaggcaaacagatggggtggggaggccagggaaacaggctccggagtagggccctcctccctcagggtcaatgcaatggccccagacttcctcacttcttctgtgggacgctgccctatcccccagttctgctcactccagtgtattccgtatctaggctcctcagcagccaactcccaccttcctgactctagctggtgtccactgagggacacactccaagtcagttcccaggtcctcaaataccagctgaatgtctaacttctgggtgtgacattccagcccctagaagcctggcctctgctgctcccctgtccttccatgggtccactcctccttgcgccgggggggatgaccctcacctcaccttccggtcgcagctctagctgcctcctccctgaagccctctctgactgccctgccgattccgggccctcgggagcttccgcgagcagggccgtggcgcaatgcatctctgtgcccggcaccaagaaccggcccgggttatagggggcgccaataaatctttctggaacggagcccccgctctgtccgggtccccgcatgaagcctcagtttccagcgaccgcgctgctgccagcctggctcagccgctccctcccgccccgcgaggtacccgggcggcgctggccccgggccggccacacagtagctgctggaaagggctgacccaaataggarcgagtgaccctctctggggggccgcggcacggtttgcagagcgcgggatcgggctgccggcagcgctgcggtcccaatgcgcgtgctggggacttggacctgggccgcgcagcccaggcccgcgagccgccgcgaccccttccgtctctgtcgctggatgtcaggcagagcctaagtttccctcgtaagacagcggcctcttttgaaagtatccgtgagagcactaccccggcctgccggagccccagtcgacgcacagaaaagcctcggcggcacagacgcgggctttattaacatttggtagtgagcacggcccccagggcaycgcgggggctcgggtcccggtgacgcaacggttaaacctggctcgcgacttagcgcaggcgcctgggggaaagcccggagcctgagggcggggccacggagccacttccggcggctgtgggcggaaaacccaaaacttccgatgggaccaagccttccgtggcttcacacgcaccggaagggaatctgggtcagccctccctccaaaggagacagcacggatcctctttttgcataggcctgagggaagtacttccgcccatattcaagatggctgcccagggcagtgggaacgggtggagtttcgggatgtggagcgaaggtcactgggagggggcggagcttcccctgcccaagttccgatcccaccaggactggragactcgcgtccagctggagctttgccgcatctgcgttgctgtgcccgcgctcttcgggcgaggaagtcccttctggtggagggagaaaagggttacatgagttagattaccatggcagctcgagccaggctctccacttccgtgagccttcctctaagtgagatcgggggggagataatgaaggccacaactcccaggaggctccacgccgggcggtcagggacgctcgcgaggacgcatgggcccccaggaatgggaactggttagatcccaggaactccgtgccggagacgggaagagaggatgcctagggccctaaatggaaaggccagagctggagacctagcacccagaagatgagaccgcaattcgagaatcaaagggccgggagcgatggtgagcgcctgtaatcccagcactttgggaggttgaagcgggaggatcctttgaggccaggagttccaggctgcagtgagccgtgatcgcaccactgcactccagcctgggcgacagagcgcacaggtgccagcaaggagcacaaataccagcatgcctggtcttccaagaattcggggaacccaggagctttggcctggagtgggatctagactacagatcccagcatgccctgtgagcacacacacacacacacacacacacacacgcctggagtgggatctagactacagatcccagcatgccctgtgacacacacacacacacacacacacacacacgcctggagtgggatctagactacagatcccagcatgccctgtgactgacacacacacacacacacacacacacacacacacacacacacgcctggagtgggatctagactacagatcccagcatgccctgtgactctctcacacacacacacacacacacacgcctggagtgggatctagactacagatcccagcatgccctgtgactcacacacacacacacacacacacacacacacacacacacacacacgcctggagtgggatctagactacagatcccagcatgccctgtgactcacacacacacacacacacacacacacacacacacacacgcctggagtgggatctagactacagatcccagcatgccctgtgactcacacacacacacacacacacacaccaggcgggggaagagctggggagtgggggcggggaagtcttgtgactacaaatcccagaatgctctggagctaggaaggaacaggacggctttggggaggggtcgtgggactccagatccgggcgtgccttgggacaaggcagggacagaccggcggggggcggcctggtacttcaggtcctggcacgctggggactggcgctcaccttaaaggagtccacaaactcgtcactcatcctccggagctcgcggccatakcgctgtgmtgcccagaggttggggggcgccgagcgcgarcggccccgaaaggggctgggctcctcccccatcccttcgtcgtcctccgtccccgcggggtaggagctgtggcgactccggatctccacagccccagcgcctgcagagggtcagtgggtaggggggcgacgttaatctcagctcctctaagcccctggccctgcctgaaccctccccatcagctctgcaggcccactcgtgggtcttccaggggcgcatcacagcccacctctcagagccccagtcccttgtatgtgaatcgaggggaagctcaggggcctttggtgaagatttaggttaacttctcattaatcccacgaatccttaccgagtgccaataatgggtgaggccctgtgcctagcacaaaataagggcataagaaatactagttacatcacaaggtcaggagatcgagaccatcctggccaacatggtgaaaccctgtctctactcaaaacacaaaaattagctgggcatagtggcacgtgcctatagtcccagttactcgggaggctgaggcagaagaatcgtttgaacccaggagggagaggtcgcagtgagccgagatcacgccactgcactccagcctgggcgacaggctttttttctcaaaagaaaaaaaaaaaaagcaagaagtattattagtgcaagaccttcatggggcctcctggcaacccctgggttggtagctatttcatagtgtctgttctacatcggaggaagccaatcccttggataggaaagtgtcctgccacagccggcaggattgaatgcctcctctgcaagggacctgcagagcccctggagaacaagaacttggccgctacatgtccgcatcccccacagagccttctctggagacagtgtctggaactgttgacgtttttaggtaccattgatggtgcacttacgtgtaggccgagacattcccttattatcctcctaaccaccctgggaggtgagtaccaaacatgcttaggtgagaagacagaagcttagagagttaagacttgcccagtttctgtgaagctgtggaggcctgaggctggaaggttccaaaggtttggtggaatccagagtccagtgatgatcagcggagctctgtgtctctccccttgtctagccagccttcgactctcttagcctgtgtcctcacctttatgaggggataatcctagccctgactcccagtggctgtgtgaacatcacataaaattaaaaaatgtgaaagtgctttgtggctgggcgtgattcctcacgcctgtaatcccagcactttgggaggctgaggcaggtggattgcttgagttcaggagttcgagaccagcctaggcaacattgcaaaaccccatctctattaatttaaaaaattaataaaagaaggccagacgtggtggctcacgccagtaatcccagcactttgggaggccaaggcaggtggatcacctgaggtcagaagttcgagaccagcctggcctcaaactctggtgaaactccgtctctactaaaaatacaaaaattagttaggtgtggtggttcacgcctgtagtcccagccactcaggaggctgaagcaggagaactgctttaacccagtgggtggaggttgcagtgagccgagattgtgccactgcactccagcctgggtggcagagcgagactctgtctcaaataataataataataacaaaagaaaaaagaaagtgctttgtaggctgcaagtgcactatgggttattattcagaggcccgcctactatggtctatttgaactgtgctctgtgccatctcccaactcctgccaactccactcctctacccagaccgataaagacttagaaccactcccctgagcaaacactcagagtgcaatgacagagtgagaagcaggtggggggctgggcgcagtggctcacgcctgtaatcccagcactttgggaggccgaggttggggagatcacgaggtcaggagtttaagaccagactgaccaagatggtaaaaccccgtctctactaaaaatacaaaaaaattagccaggcgcggtggcaggcacctgtaatcccagctactcgggaggctgaagcagaagaatcgcttgaacctgggcagcagaggttacagtgagccaagatcacgccactgcacccatctcaaaaaaaaaaaaaaaaaaaaaaaaaagagaggcaggtagggaaacatgctgggtgtttatggcaagatatgtctgtcagggaggctctttggaggaggtaaattacaggccaggaactgaaggcgggggataaccattggaatgtctcttctcccctcagaggacctgaggacctggcctgtgggccagtg

SEQ ID NO: 94949 - DNA, 42703 bp, Homo sapiens
taggaattttctgttttccacctatgatcagaaagaatctaggagtcatcctaatttgaatatttcattcatccaaattaggatgactcctagattctgtgggtttatagtataaaaaaattctcattgcttacaatgctttggcattacagttgacccttgaacaaaacaggtttgaaccatgtgggattccatttcaaccaaatgcagcattccccggatgtaaaacccatgtatatggagggccagctttttttacactcgggttccacaggatcaacagtgggacttgagtatgcatggattttgatatatgcagcaggttctagaaccaagccttcatgtttactgagggagggatgactaccttttgtcatgaactgtaaagcatttaaacttttacccttcttgtaagctaataaattaatctgctggtttcatggatgctggcagaagtcacaaaaatcctagttaggagacaaagtactttattgcttatagcacagaaagcagcatgagcatcagcatatttgtcagttcctcttgcccccaactcccacagggaatatgtaatggacccaaatgccacctgcacacttagtgggttgcactgcaaaagagaaacccagatccaagggtccaaatttcttgaacaagcagcaaacaagccaatctcccttaccctgatggtgagcagttacacgagagtcattgtacagttaccctgacccacttaattgtctatgtgtctagctgcaaaaatgctcagtctcaggagacagataagacttgcaatctggcatacttagcaaaattatgcagggacactcaggaccaagacagatcttcctcttctaaccatccacccttaaacgttcttggcagaactcaaaatttcacatgaatatgtgactccattgaccactgtgattaatctgatgtatagaggcttaattccatttgtcttgtatagcacttaattaagggactatcaacaatacaagcagcaggacaaagtattgaccttaatcatgacacccagagttctgaataccacaaaccaacagggtctaccttggaaagtcagtggctttctccttaaggctctcatttgacctttctacttggtttgcggcattaatccaggtatagctggatgttttagggacgatttagaatctgacatctgttgcaattctatcatctataacaattctggtcagtgagttgagttggagctgactaccttctaaggcccaggtggtatcattaatcacttcagctgaactcagggacaaatttcttttcttttttcttttcttttcttttcttttttttttttttttgagatggagtctcgctctgtcgccaggctggagtgcagtgctgtgatcacggctcactgcaacctccacctcccaggttcaagcaattcccctgcctcagcctcctgagtagccgcaactacaggcctgcatcaccacgcctggctgattttttgtattttaggagagacgaggtttcaacatgttgaccaggatggtctcgatctcctgacctcatgatccatccgccttggcctcccaaagtgctgggattacaggcgtgagccactgcgcccagcctcagggacaaatttcttaccaccttttctaattatctgactcccatcgttgggacaaccaaccacaaagtgcacacaaatgagtctgccctctggaaagttccaccaaataactaagggtggccttatttcagagggctccccacagtcatctgagggctatgtagtctattctgggttccgtaaacaatctgaaattttaccctatttgcaagctaacaagctagtcagccacagtttcatcatgctagtattagactcaagactcctgtgttaagggataatttattactcatggcaatagcagtgaccagagcaacagtattaatttttgtgctgctgttctgaaccccaattcccatatgccaacatgaagatgccacataatacttgtactggcaatggactgcagcatagtgtagtgtagtgtagtgtagtgtagtgtagtgtagtatagtatagtacagtaaagtacagtatagtacttagagaacctgatttttttataatgggtagtaatcatgcttgttctttgctccagaaggagtcattttctctatcttggaacgctgttcactacaaaaacatcactgaaaagatagtttcagacaaagccagcacctctgttctcaagatattcagaaacccagaaaattgtctcccaagggaagcctgtagttgggagaaattatgagaaaccactaacttctaattcagattttgcatgagttaggattatattcagctacatataacaaaatcacaactacagtggtttacctaaacgtgttttttttttgtttcatttttttttccctgcatgtcaccagagtccagaagtgcacagtccaggtctggaacggctacatacaaggtcatcagggacccgggtccctatccgtctgctccactattcttgtcatgtggctttccaccccatggtcacaacatgcatacgccacctccatctgtacagttctggtggtaggtggagaagaatggtgactagattttaaggaaggttaaaaacactaggataggaggccgggtgcagtggctcacgcctgtaattccagcactttgggaggccaaggcaggcgatcaccacgtcaggagttagagactagtctggtcaacatggtgaaaccccatctctactaaaaatacaaaaattagcctggcgtggtggcgggcgcctgtaatcctagctactccggaggcctcagcctactactccagaggcctagctactccggaggcctcctgcggaggcaggagaatcgcttgaacccgggagggggaggttgcagtgagccgagatcgcaccattgcactccagcctgggcaacaaggtcgaaactctgtcttaaaaaaaaaaaaaaacccaaaacactaagataggaaagaggaagaattaagatatacatgtaaggtgatcaggagacactaacaagttaattttctcagatgcagtgtgagtataaaaattagaaaatttgagcaagtaggtggattagatcaaagtgatactgtgttttgaaggtcatcagcaaagcattaatcagttaataatgtaacaggaatgatttgaaaggtttagtgtaacagtaattgagtagataagctatagttcaaaaatatatttttaatgtaaatgggtaatttgaaattttgttacacaaatgcacagttcaaaagtactataatctctcattgttagatgttgctattcaggtttataagttatagcttgtagtactgtgtaaagataggcaccatgcttacaagatcagaattcagcttgaggctgtgtgagtttacgacaacactgtagtgtgccactgtacttctctaccttctgtatcgccgtatggaattactacacaaaattagcactaagaaacctaaatttccttacagtagaaataagcttatatgaataattctcttatagaaattaaactatctgctgcagttgtcagcagggtttaatttttagcataagctgaggccatcagtttcttagcagtcctattcttaaataatcatttctgtttaagagatcattttactgaacaatttcaaagcactaaatatcttcgagattgaaaaaataagcacctatagatggagcagaaactaaagaagaacaatttaaggaaaaagacagtccttaactatgcacgcatcctatgaattatccatgctttcagctggtttccttttactgcactgtctaaaactccatatttaaaagggtttgatacagcagagttagaatgtggtcaatgaaatctggagcttgtcaatgggtttcaataactgatgccacttttagctctgctaacatagtagagattatagacagaattctcttggccaactcctatcatgggataaaactcctcccacaccagtttctaaaggtaatgtaacttgcttctattggtttaaaattattaaataataaatacgtttctcagctagtcaaaagatatgtccaggctcttctcacaagttcaatgttaggtgctgtgggtgcaaacagtaatttagtaattgtcactgttattatagtaatcctaataatcccttattcacataattcttcattttttaaaagtattccatattaattttcttatttgagattctgaatattactctccaagtaatactgccccattttacagataaggcaattcaaaaaacgtttaagtgacttgccctaagtcacaggcactagagaaactattacatgcaagataaacctggtcccttcatttatgacactccattcatagtgggacattcagacgagttgtgggcaactgcaacatggttaagtgttgagctacagcatacaacgtacatggcatggagaacagtcttggcgggagaggggtcagggaagtcttcccaaaagaaacaaagtgtcatttcagacttcattgtgttggccctggggaagaacattcacttctactaaattcacttattctgttctcagaatcttccaagttgattttgtacttgatagagcacaacttagaaggtcaattaactttacctctaggccagtgtttcactcaccgtaatttctctagcaacttcatcagtcacctggggtcttgttaaaaatacagaggagggggcggagggagggcaggggccaccctggacttaactttttctaaatctcttgggggtgaggttggggaaaattgctgctttaagcatgaacactttcgggattttgaagtcaaacagcaaattaaaaggggtatttttggtagtggctcttaaattccagcatcaatacagcctttttttttttttaataggggtgtatttggggggtagggatagcaattttatataactgggattgggtgctataaaacaggctgttagcctccagccctcacctgcaaggtggctggcttaaggtaggtacttgataaatgtggatttatttaacagaggaacacttgtattcataacctccaagagtttcgaaagtctttctgctccaatcttccagtgtctagccagcagcattgctgcagagtggaacagctagggtgcgtggagtttgcagaatgagttcaaacctccagacttatcagttagcagtaagaacaagttccttaatctgcctccacctataaagaaggagtacaattgccacttacctcctagagttgttgagagtcttaaatgagattaaatattataaatagattatcaatggaatatattataaatgcaagtgcttagaactgtaccttataaatgagctccacagatgcttattaaaacccgagcggtgccctctccccttaacatccgtaataggcccccttacacctcatacccattacgagtcaaaataataataataataataaataagtgaacaaacgacaaacgagaaaactaggctaccaggcactggggcgatgggccacagcccggcggggtagtgggcccggaaggggcgcgggagtgggctctccccgccgggctcgcggcacgtggtcggcttgggcgggagcttcgcgacagtgggggaggggagcagcgtgggacgccgaggaggggtccagaccgccaaggctacgaggcgccgactgcgcaggctcggggacaggcgcaaccactgcgcgcagacctgagggggagaacgtccacccggctgcacgctccctggatctacttgcgcagcgaaagcttgtcttcttcctcattttaacactgtgtatggcgccgccttgcgcaggttgttcaccctaacagggcctctaacctcgagcccgaaacggcctccttctccagccgtgccccttcctcccccgtggaggccgcagtggatgcgctcacctccctgcggcctcctgaggtggtttggtggccccctcctcgcgagttggtgccgctgcaactccgattccgagctttcggcacctctgccgggtggtaccgagccttcccggcgccccctcctctcctcccaccggcctgcccttccccgcgggactatcgcccccacgtttccctcagcccttttctctcccggccgagccgcggcggcagcagcagcagcagcagcagcaggaggaggagcccggtggcggcggtggccggggagcccatggcgtacagtcaaggaggcggcaaaaaaaaagtctgctactactacgacggtgagcggccgggccggtgtcggggtgggcgcgcggggccgggcgctgggttccgcggctgccgtcgcgagtgggcgccggggctgaggggtgggaaggaggagggaccgacatttggccgcatcttaacccgttcccggcccggcacagttagaacgagaccctcttcctggcgcagcccccgcggttcctgcgggcgggaatcagggggcccgcccgtcttgtctcctgcctctcccccttcggccgtgcagtccgcagcctcgaaggtggccgccgctggggacggcgccggcctaccccgccttggtggtggcggcggcgaagggggcggcccattctctcccttctcccgcccaccattcgtggcaacgcaggtttggggtgccccgcgtcggcctcctaccccctcgacccgtcccccgcgaggcaaaatttstatcccggccttgactctacacaaagccccgcggccgcgagagctccgcccctcccgtccccttccctcctcctcgcctgctcgcctcccctaccctgcgttcggtctggccggagcgtcttctccttcctcggcttaccctttccccggacccctcctcccggtgggcgctggagagtagttactgagggtgggggctcaggtcgcgtgtggctttatcacacccatgttttgcgtgggctccaaccctctcctttgttcgctgggttctttgagcgcgtctttctcaggattcaaatggaagggcttcacttcctcaataatagttcgggttttccagtttcaggcagaaagacttcgtaggaaataagaggtggtagggagatgtggaactgctactgcttgtgttgtagatcagactccatgggtcctggcttgcctcagagaggtggttaccacccacttctttgttgctctttgttcgatcaggaaatagaccctgctttggggatttagagagcattggtatcttgcaaaggctgttcctaggtggtggggaatcctggtatgggaaaactttgagaagtgggagaagtgcagaagtactaaatattctaatgaggtaaatttgaggtcaccgtgtagtgaattataaaagtcagataatttaattatcttaagcattctataatttggagtatgagcagtaacattaaatcttcgaatcctgtttcctgtgttttcttgctcaatggagtagtaacctgttatacagatttcacaaaggcttggtaaatagtttatagtaggttactcttgagagaagggattccaaaatttaacagagaatctatcctaggctccttctcctgaaagtcctgtctgatttgtaggaagcaatacaaattttggaagctgtttcctacatgtggtgtattgtaaatcacaaaattttagagaagtaagaccccagagcaccagctcagaataaatctactttaacttgtaaatgaccgtactgtctctttttagttaaaaaggattaatcttttaatgactgatacatataaaataaccacctgtgtcatttggggaaaatctgaaatcttacagaacaaatctaaattgatctgcgatagctaggacagaataataacagccctacttttaaaaatgatttttcagaggactagatatgcattatataagttgatttgaaattatgccatcgtggaggggtggagatggaaatacattttaatttcaacatgatttacattgcatattttgggttattcttgccctgcattccctgatcaaattggaaaggaagtaaccctgcgtataagttaatttgtaaaattacattgtttctaaagtttagagatttatccttgtcagggcttggagtaaagaggaaaattttggttagggaaagtggtactgaggtccttctcgaagctgtcagttggtgttggtagtgatgggctctgaggaagtaagctgcttgtaatttgttgtcaccacaatggaaccctagaaccaggagggtacacttgagtagcagtttctgaacagcgctcttgtcctgggcccatttatgataaccttcgttgtgggaatgggagcaggcacgggtacccgggaaaggatgcaagcttgataagtrgggtggaaatatttgtcttgtgattgtgacttaatatgatactttattgtagcccattcacctgcttacgtgatggccagcaacaagtgaatagctgatagtttggaaatctctggtgggttattttgtcttttgtctgtgactcgtttgttaaagtggagttcctagttgcttatgtttcacatactcttttaatttttgtgggagggaattaaaatattttgcagagattattaatgtttatattatgctaattattaatatgtgatagtgtgctgacctcatccaaaaacttatatttttattaccagagaacattgttttgtcagcttacaaaagtagcaatactaattctttttttattgtgagaagagaatgcaaggaaaggagcttctgtatcaaagaatcgtgactttaaggtatataacatggattggattgggaatgggttatatctgtagtaatagggtctgaattatctgctagcctaggttagatggttttaacttcttggtaaaggaagtagaaggaagaaagtgagtgaaaaagaaaaggacggaagtagcaaattctataaccataggaatcctacctttaggcttcctggggctgttaggcacacggagcctcttggccacacagaatgtctgccactgaggctgtttgcatcttaatgaaagaacttttaaatatatacatattgttctctgcacgttatgtaatcttcaggtaaccctttaggtcactgaaacgttggtcccaagggaaccttcagacattgatggattaggtatccttaaacctttgaagaaaagtaagagaagttattacttctctgactgtagctattgatccatgcctccaaattcccaaaaacatacttctgaatcatgttccttctttatacactagaagatcatcaagaatctgtaaaatgatacagctaattagatagtcactaagatcccttctgggccttaaaacgatgtgatttttctctacttaaatataattagcagctaagctgtgttaggctctagttataccactcacatttttaatactgtatctagacatgtttatgctttgttttgaattaatcttgaggccaaacatatttagtgcttgtttttatggtgtatacagtataatagggtttatatacctaatttatgtaactatacacaaatttctctgtgctctattttttcctcctctgagagggatgcataatcagttttggagacaagtggtccagaaaaaaacactcaaagactgtatacagataaaactatataaatacaaaagttatcaagattaggccaggtgtggtggctcatgcctataatctcagcactttgggagactgaggcaggcaaatcacctgaggtcgggagtttgagaagagcctggccaacatggcgaaaccccgtctctactaaaaatacaaaaattagccaggcgtggtggcaggcaccagtagtcccagttactcgggaggctgaggcaggagaatggcttgaacccaggaggtgcaggttgcagtgagccaagatagtgccatgggcaacaagagcgaaactccgtctcaaaaaaaaaagttaccaagatgatacctcccaacgtactccttcttcagcaaattatagaaattctacttggcagccaacgattgtcagattttcttagacttgyatttatgagtagtaccaaagtcttttgctgaataacctttaatacaactacatgggttcttagctgtggtataaatctttattatccgtgaaataggtaataatttctttggaggcaaataagtgctaaattaattatagcagcagttcataaataccagtaatactaattgcacaataaaacatgactaaataagactgaaattttcctatacttctctttccccagaaatcttttgcctctcttttctttcaaattttacctcatcagagatgctttctcctattacctaagtccctgttattgccttatttttcttccttttggttgtaccatataacttttgtctctctcctcactataacataagcttcattaggacagtctgtctgttttgcttgtgtttgtatcttcgccaactacatttaaaaacgtagcttttttttttaattagtgatgaataaattattaattccttatactttttttttttttttgagatggaattttgctcttattgcccaggctggagtgcagtggcgtgatcccagctcactgcaacctccactaccctcccgggttcaagtgattctcttgcctcagcctcccaagtagttgagattacaggcacgtgccaccacccctggctaatttttgtattttttagtagagatgggggttttaccatgttggccaggctggtctcgaactcctgacctggggtgatccacccacctcagcctccctaagtgctgggattacaggcgtgagccactgtgcctggccaattccttattcttatagatagaacgctttcatataacgttccctctaattcttgaaactactctgaactacatttaggtaggatgggtggcattttggcatttttggtattgtttagatgaaaacagattcacatttgtttggtgcagtctaccacttttccttttccacactgactgtagttttaatgttcaaggagagttcaacatccggaatctttatttttcttttttccttttcaaagtgtttcctctgctaccaaacaaacaaaactccttaacaaaaactttaaatgcttctgttgacaagtccttaaaggaaaacacttgggattggagaaggcatctcttagggaatgttaataaattcaaacttggaagaattcaaatcaagtctaaggatttttttgtactggttattaagccttattcctctgtatttcagtagcagtctgcttattgttacttgttcattaagccagctttgggttcagacatatcaaataggcttaaagttcctactgtgtgccaaatagacaaaagattgctcaagtcctaagaaggaaataaaagactgcaggtataaagtaagagagggggccgggtgcagtggctcacgcctataatcccagcactttgggaagccgaggcgggcagatcacaaggtcaggagtttgagaccagcctggccaacatggcgaaaccctctctctactaaaaatacaaaaaaaagttagccgggcatggtgacgggtgcctgtaatcccagctacttgggaggctgaggcaggagaatcgcttgaacccgggaggcagagaggttgcagtgagccgagatcatgccattgcactccagcctgggtgggtggcaagagcaagactctgtctcaaaaaaaaaaacaaaaaaagtaaaagagaggggacctttgatagtgtaatcagaaaagggaagacctgaaggaagagaatgggccagccttaaaaagagtttactacataagatattacaaatagcaaagccagatagttattaatagaacttggtgcacttaatgggaaggaagacaaggaaaatgtggagtcccatgttaggcagtaaaaagtgggactgcacaaaactgtgtagtaagaaatttgactttacccagaggtggaaagccattgaaagtttctcaaatagaatgcattctctcaaaataattggtaaggagttgtggaatataggctggaagcaagaattgaacacatattggtccatataaaatgtaatggttgcattttagatagaaatagacatatttaagagagatttgggcctcaaaccaatagaactttttgatggattagaaatggagttggagctgaggaatggtgttagagaatgaaggatgactcctaagtttctggattgagcagttaggtggtatgtggtactactcactaagattgggaatacaaataaagagctctgttttgaacatcttatatttgagatccttattgaattcaagtgaaaagactgagaagagagttaacctctgtgagtttataatccagagaggagagtctagacatagaaatttgggatttctcagcttatatcaggtgaagtattgagactgaaaaagatacagcatagacagacgactggtcccaggacttaactcccgagagaagagaatttagggcagaactattgttcactgatgaacccaaacccttagaacagtacctgcttggcacatggtaggctcttgatttattaaatgaatggctgaactgaaaacccttgatgtttaaaggttggtggaggagtggccttggggtacaagtaaaatcccaagaaaatggtattatggaagccaaggctccgaatgtctcaaggaggaataacctccttgaaatatgtattaaagatgtgttaatatgtataaaaaatggatagtgggctaagtagtctggaagatgaaaataataaacttttttcttttctcttgttttttttttcctgagtctctttttgcagtcaacttatctttgtggctaaaggtacatttcacagttctgaaatccaaaatgacctgaaaattgaaaaaaattttggtaactcatttggaatcaaaatcttaacctgaatcaatgtgaggctatttatgatctttattcctctgtgaataccrtgaatattcacacttttttgctgtagaaatattaatgtttgattatatcatgccacccaaactctaggctattacataatatatggcaggtgtaccatattatctctacaaaatctgaaaaagtgtaaaatttgaaacatatctaatttgaaggaatatggataagagattgtggaccttagtagacacttccattctgttagtttcttgaagagtgagcaatttgtaaaattttgcagataaataattctttacagtaatttctttgcattgacaattaaagtttgttgtgttcaaggaaccaccttgagctgatttttctgaatgtttatttcattggtaaagtatttttatgtacaggttgaatatcctttatctgaattcttgggaccagaagtatttcagatttggggaggttttgcaatatttgtaattatttaccagttagcatccctaattcgaaaatcaaaaatttgacatgctccagttagcatttccttgactattaagttggtgctcaaaacagttcagattttggaacattttggatatcaaatttttggattagggataatctgtattttgatgcaaatcagtaacatttaaaatgcccaaattattaatacattactgaccatttaaatgatgaataaaaattgtaggstcttaaaacttcttagcctttttatactttatgaaaaagtgggctgggcacagtggctcacatctgtaatcccagcactttgggaggctgaggcgggcagatcatctgaggtcaggagtttgagacaagcctggcaaatatggagataccccgtcactactaaaaatacaaaaattagccgggtatggtggtgggcgcttgtaatcccagctacttgggaggctgaggcaggagaattgcttgaaccccagaggtggaggttgcagtgagccaagatcacatcaccgcactccagcctgggtgacaagagcgaaactccatctcaaaaagaaaacaaagtggatgcctacaaagtagccatctagagaattgtgagatacagaattagtgggaaaaagttggagatggttattttataacgcctttatattttagaagaattcttttttttttttttttttgatacagagtctcgctctgtcacccaggctggagtgcagtggcacgatctcggctcactgcaacctccgcctcctgggttcaagtgattctcctgcctcagcctcctgagcagctgggactacaggcgcatgccaccacacctggcttttttttttgtatttttagtagagacggggtttcacaatgtttgtcaggaaggtctcgatctcttgacttcgtgatctgcccgcctcggcctcccgaagtactgggattacgggtgtgagcctccacgcccagctagaagaattcttggtaaaccaaaaaattatctgtagcttggctgccctgtatacatgtatcatttaggttctttgtgtattctttgtgggactggggtccctaaatttcaacagagaaacttgttgaaagctatgcgtattcgtatacgatttgaggaccctattagtaaaaagtaaattactctgatatattaggtacagtttcttgtgttcattttctttaaattaaccaagaccctaagcctttatttaaaatatttatatttcatattatgtctttttttcagccttcaccctgccatttctagtgaatctgtaagtgtccttgacattccctgttgttattacttaagaacattagctgtgagctgccctgccagagtttgaatctagctcctccacttgctggctatgtgacttaggcaataatacctgacttgtctgtttctcatccttcattactattatacaataggaataatgtaataatacccacatcataaggttattgacaagattaaaagatatgtgaagtacttaatagtgccttctagtaagcactcaacaagtgttaattactgctttttttttttttcaaacacacttgctcagaaattgctactgtagtctccaattattggggcctggggcttttcactggattttcagtgtgcatcaaataactagagtatttgatgttatgatgtggtagatgttagagacatttcatttgggtaattgttacacagaggcagatagatggaagttattgtttagtttgtgtcttttctgttttaggtgatattggaaattattatgggcagggtcatcccacgaaacctcatagaatctgcatttctagtgaagactagactttcattatttttactttaatgatttctttagtagtgataactaagaaatgccttcccttgtattaatttaattacatgatgctttgtaataacactagtgggttttccatatctaagaaatgatgagaccaggctgctttcaaggaactatatatcccttgtattgtcaccatgtaaggtagagctttatggtagattctttcttaataggtagtttattttctgcaatcatagcctcttaattataattgcagaggaatgttgcaaagggccatggccctgctttgctaaactctatattgtttcttagccttgttggcacctgcattaaaaaggtggctttccctttaaaagactttgtatatgaattgttttcagaagagagctgtgctgaaaatgaagttaactaaaattagaggtgtgataccaacaaaatcaagtatttatgttattagaagcatggattttgtaaaagctgattgtttatccygtactgttatcaaatatgtaggagagaggacaaaaaagtttttggggttgtttccattaaacaaacaaaaggtgtatttagggaggactttgaaagatttagtggataaatygcattttttattctagcttttattgtaatatataaacccgtgttgaaatgatagacttcaaaccattaaaatagcttgactgtcctgaccctgtggggaattagttccaagacttccacagatagcaaaattcatgggtgtttaagttccttcaataaactggtatagtatttgcatataacctatgtatatctccccttacactttaagtcatctctagattactcataatacctaatacaatgcaaatgcagtgtaaatagttgttacactgtatgatttaggggaagattacaaggaaaaaaagtctctacgtgtttccagcagacaccaccatctattttttaaaaatattttcagtctgcagttgattgaatccacagatacagagggttgactttatatatttgagaggcttcttgttatttactattataggaaacactggagctttacctaaaagtattaattttattgaaatttagttgatgaaaatctgtgattttgttattttctcttttttaaatcttatgcataagtttaaagacattgtgatataagatgccgtttaaaaagacaggctaggaattacaactttttagtcatgaagaatgagacagtatttttattaccttgaaaaatgtaatgctgtgtcttagtggagcaaaacctcatttaggacctaaatttcagttaccaaaacttccctgatgggctttaatatggacacggtatgttttaacatgcaaaacgccaattatgagatttctgaaatgccagcaaatcatccaaaaagcagtatttgctgaaaaaattttaaatcataccaataaaactcagagaacttaaaagcatgtgaatttgccagagaatacagaaagcaggcatcatttcaaggaacagaaattttaaaaattgggggtagctaaaaatcagaaaagcttgctttccttaatctacaaataaatataatgtgtaataatggagtcttcagctggtaaaagtgtgcgtagcgtcttagtcatctgatacagtttgaaagttgcaaaataaatctaagttgctaaggttttaaataaattttgttaagtagtaaatgccttctaatgatagacatacataaattcaaatarttcatggagggtctcttgtctgtattgtttagtttgtgtcttttctrttttaggtgatattggaaattattattatggacagggtcatcccatgaagcctcatagaatccgcatgacccataacttgctgttaaattatggcttatacagaaaaatggaaatatatgtgagtattccttttaatacatattcagcactgatcttttttatttttttttagctactgtgaaactttgtctattattccccttttgagggcatttagcagatgaaaagatctggaagaaaacaaacttcttttttcgtttattcttaggagatgaataagaatgagagctataccctctttttccttttcctttaaccatttaaaaaagttccccctaccctaggctttcatggttctggagaacaactcagtatagcaacaactcagtgtagcatattaagtatttttttttttttttttttttttacaataattgttaatctgcctgtgctgctgaaaagagttgacctgggactgttacaaaataataacacataaaattaatcccacaaatatttgcagggcatataatacatatggaatactgtgttagtgtggccaagcatagtacagataacacaagtgcaacagctgccttaatgtttttgtagataaagatgaggrtatgtataaacaaatacagacacgacaattagctatttggggagaaaagaaatatttaaaacaattaatgctaggcaatatatgtgaatatgtgaattattttcagttacatgtagacatttagagaagaggggaagttagaataagactcagtctggaagtcttgtggaagaattgtgtcatacgtgaaattgagctcttcggaacaaggaagattaggatagaaaaaaggacgagaggtcgtgaacaaagatttagaattgaaaactcttgtagtgagtgatttcattgatgaaatcactggatgttttatcatggaaaaggagagaaagtagagtttatgaacatatggatttgactttttactcgaactgtttccactaaaataaggagtgattaaatcatagttgatatgcctgtgtaatgcttttaaaggagtttgaattagttttgagattgattactgttttctaaaacacatataagtttgggttagttttggaatttatatattttgttctggtagacttggttcttttgaggggaccgataggggaatttgtatatttgtttgataatactgatataaccggttgtwattccacagttctgacatttatttctcttcacagaggccccataaagccactgccgaagaaatgacaaaatatcacagtgatgagtatatcaaatttctacggtcaataagaccagataacatgtctgagtatagtaagcagatgcagagatgtacgtttctaagtaaaaagtagttttgcwttgataaatgtaaattagtatttttaggagcttagaatgatctaaatctgaatatttttcctgttggtctaatatgttacagttatttactgatttgaaaagtcattttaacactactaaagctacttaagaaaaaagtaaacctatctgaagcttattggyttgcaaaactgctgtttgggtattcttctactcctagtttgctcccctgataactttgggttaatacatattggtagggagacctcactcccttactccctcgcttcaaaaaaacaaaaacaagattacactttgattagccttagcttggcatgtacatatctcttgtcttgtctttgtgtacttcagttaacctggactataatacacatctctttttctttgttaagatattagtgaagcttttgattctacgtaatgttctcttgtacaggttaaaagtattttatttttagagattagtaacaaattggcttgaaggtagaatgcaaaagtcaacctaaaattattggaacagtatcttttaaagcttgataccaaagttcattctcattagtgtttgtattgactgacttcagtgatgattatactaaattagtgtaggtgctagacatctcatatttacaacctcatacacatttctgccatatcttgtttgatttgttataatgctacaatgtaactagaacatgtagtatttaattttttttttttcaatgaagattccaacttagatgcaaaagaggcatgagtagcccttgggcaaacaacataacaggattgatttaaaacccacataataatgagttctattaagcttatgatcctggccaggtgtggtggctcacgcctgtaatcccagcactttgggaggcggaggtgagtggattacctgaggtcaggagttcgaaaccagcctggccaacatggcaaaaccctgtctctattaaaaaagtacagaaaattagctgggtttggtggtgcgcgcctgtaatcccactactctgtaggctgagacaggagaattgcttgcttgagccccagaggtggaggttgcagtgagccaagctcacgccattgcactccagcctgggcgacagagtgagactctgtctccaaaaaaaaaaaaagattatgatctctctgtgcagtaagaaactaaaattcatttcttatagtgcttgtgacttaagggtatacaaagatattaatatacaaaacaaggacccttattcttgaagaggttacaattcaagggcatagggaaagactaagaaagggttacatacatctgccatatcctttcattctctcagtgctaaggaactaaatgtgtgatcgtttatctgtaaatgttttccttgttgtctttagtatcctatgttttggctcccatgaacctagttaattcttagcaactttcaagatcaagattagccatgggaataggcaaccagctgttacatctttttggtttagtaacttactgacatgcatttcaaagttacagatattataggtatttaaggagtttcaaagaaagtaaattataaagcaattgaagttgcttttagaatgttaacttattgtaatattaaggggaaaggcctagaaaatttaagcctgtgttttaattaaataagaattgttgtacttagacaactattgagttcttgttaatagacagaaatattccacagataatcctgataagatttgatgatctttcacagataacactttaattaccttggataaaacaataaatatattttaaagttggaaactttatattatactgtgaagtgtatgtttgatgattgcatcaagcaaaaaagtatttgtgggaaatagtttttgtaagaaaaggctttcattaatttgcagaatgtgttgaaattaatgaaatccatmttccacagttaatgttggagaagattgtccagtgtttgatggactctttgagttttgtcagctctcaactggcggttcagttggtaagtgctaatgcaatcagatttaaaagttgatctgaacttggtgtgttatctttcgggttatttgtgtaaaacagaagttttaatgattgtgaattttgataacaaaaggaaatcagtatgtttatagtaaagtacaatttactttcaaacctctrtgttttatgattatgacttaaacgctttttaaacttattttcacttggagacttcattcattccctttgtcttctaggtatcattgttactaccactttccacataaaccattatttaatctcaggttgcagctctaggagaatatttttctaaggagtaactcctatttgtgttatagatgatttctgttaactttcatgattttaagctcttgcttatgcatggcatacacttgtagtgtttttgtctcattctactacttttttatgataaatgtttaaaaggtctatcttgtttctacttcttagctggagctgtgaagttaaaccgacaacagactgatatggctgttaattgggctggaggattacatcatgctaagaaatcagaagcatcaggattctgttacgttaatgatattgtgcttgccatccttgaattactaaagtatgttaatttatattgatactcttttcagtgataaagtgttttcattaaaacacaataaataaagtctatggctttaaaaaatattaggtaaaccataggttgaaatagttaatggtgaattttctatgaattcattacaaaacaatgaagaaatgcaggaaatttgcccaattcttcaattattaagacttagaagtgtggccaggcactatggcccaggcctgtaatccctccactttgggaggctgaggtgggcrgatctcttgagcccaggagtttgagaccaggctaggcaacatggcaaaaycccatctctacagaaaaaaaattagccagatgtggtggcatgcatctgtagtcccarctacccaggaggctgaggtgggagtacctgagcccaggaagttgagtctgcaggaagccatgttcctgccactacactctagcctgggcaacagtgtgagaccctgccttaaaaaaagaattagaagtgtataaaaggccagtgccgtggctcatgcctgtaatcccagcactttgggaggacgaggtgggtggattatgaggtcaggggtttgagaccagcctgaccmacatggtgaaaccccatcctactaaaaatagaaaaattagccgggcgtggtggcgtgcgcctgtaatcccagctactcaggaggctgaggtgggagaattgcttgaacctgggaggtggaggttgcagtgagccgagatggcaccactgcagtccagcctgggctacagagtgagactccatctcaaaaaaaaaaaagaattagaagtgtatataaatgtcaaaactcccattaaatacccttttttaaaagtagtttggcaattttcattttagttagtttcaactagtaaaaaatgacaatgaccttggaagtttatattctagtattttggatgttttaaactgaagacaaaaatttgaagccagtgttaaaggaaatttttttacctattgagttagtctaactgcctaacttccatatctgaatgaggctttgttctctactgatggatataaaattatctctgagttgttgaaggagttatttttccttatctgtggctgcagttkgagagagagatctatagaggtacttaggaatttggatgttcgcartgttagttattttttgccatcagttatgacacatcttagcagattctactttgtattatactgagctagtgttttttgcttgtagttattccatgcatgctatccatagaggctgacttttcagtcaacttaaaattgatactgactcctcaaataaacagtgattgagcagtatcagtgtaacatcttgcctgctcatcaggagcaaaggaaaatcatttgcaatcatttgccttgttttttaattgactgttgatgttggttccagtgtcttcaactctttgagcaagttcttgcccactcagctaatagttttaaacaactttaatttgtctggacacatttttttgggtggtgtaatcaaacatgatttaattaattgacttggtgcacagctttccttgcttatctaacacgtgagccgctcagaaactttattttgatcacagcctcatttctgtttttttaattttgtgaagaaattttgctgtactatggtatgctgtttatagtgttatgagaatattcttatgagtgcttagtctggaaatatcaatttacattgtattgttttatttagcacagttatggcaccattatataataaatacaatgctttgccatctaataatatctcacttcactatacttcaaaaggatgacatgagaagtccattttccccttattttgacatgagtatacactggtaacaaaatgtcatgacatggtgattcatgtgactcctaaactgcgtttgagttacaactgtgtcactaatctgtggtgctccaagcaccagtttgaagtcatgagagtaccacatgtagcctctgtcacagctaatcgattctgcagttcaaatgaagccataggtaataaacaattgagcatggctgtctttcagtaaaactttttttatggacactgaaatttgaattttgtataattatcacacgtcagaaaatactcttgttttggttttgtttttaaaccatttaaaaaataataaaaacttcttagttcaaagctgaaaaaagaggcaattggccaaatttgggccatgggccatagttagccaatccctattttatactattgaagatttactacagaggtgttttaattaacaatcttgagtatggtataatcttcagtttttaatatattagaaatacgtgctatgtttttgaagcatgtagaatagaacagatttcacaaagagtaaatatatattttttaacctacattgggccacaagtgggtatttaaaggcctgaggctcaaacctcagatatttgaataacctcttaggctgaatgtaaaaggtgattaaacattctggaatgcaagagctcaaaaatgggtttcctgaatttgtggtgcttcttcccatcttagaacctttaaaggaaaaaccaaaacttatggatttgttttcaggtatcatcagagagtcttatatattgatatagatattcatcatggtgatggtgttgaagaagctttttatacaacagatcgtgtaatgacggtatcattccataaatatggggaatactttcctggcacaggagacttgagggtaagactaaattctgtctgaaaaaatattgtgagatgaacctaggagatcagtaatcctatacttgaagtagtatttttctcctgagttaataatttgaaacttgtatgcagaattgaattactacgtatgcagtaacatttgctagaattcactgttgctgactataagcaaaaatttagtgaaaacttaaggacagtttttttctcagctgttttctttggttgaataaatgtttttgaatatccacaaagcatgaagcccttctcttgatgttcagtttgaatcttcaaaactacctgatggtagcctacgttgctattgattgtaaagaatggtggaataaaatagactaggtctttttaggttcttctgctcctctcttttgtgattggtcttgatttttagtagatctaattttaatctttttttttctttaagcttctaaaattggtaatgtatttaggtagagaaaggataccatagtgtaaccttgcctgcctgttaacattaagtgtatttctattttatttgttatctttttccatttgatgctcttgtcttttatgactctgaaaaccactggtcaaatcctatttctataagttcattgaaggttttttgcctcactacactttttttgaacctaactatacaaatgtcgaaatttattcaataatttaaacagctgtttttagttcagcctggattatatgggagatttatatggcattgaacaaagttttaaactrttttattaagattatttttcacatctgtggtatatcattacagtttagcaaccaaagtttaaagagttgccataaagtattcttaagctgtatggcttttctttattagatcacagtgtgatactttctcagtaaactctttgagtaaaagagttaccttactgaaacttttccatacttacaaatgggtgggaggtcaaatgtttggtttgagtttaaattatttagcttttaaaattgcagatttgtaatttcaattccttgccagtaaactccttcaatttctccctttccccacctggtcttatcttacagaccagtgcttctcaaacagtggcgcctaaactgaggaaagcagatcagcatcacctgggaacttgttagaaatacacattcttagggcccagaaactctgggtgattcttcaccttaaagtttgagaaccactgctgtaaactgatagaatacatttgtcaacaaccattacatcctagtggaagtcaagcaaaagtcttctctgttttaagcttaaagaataagacagtatctttgcagtgtgatsctagtttatctcagaagtggaaaatggaagcttcatttaatttctgacaggtggatgtcactatggtctcatctcagttattattcaaaattcttacagtttgaagtttttgaaaatattagagaatgctgttttagaaggatttgagaatggctttcaacatctctttttctcacttaagattttacaatcgctgggccgggcgcggtgtctcacgcctgtaatcccagcactttgggaggccgaggtgggaggatcacgaggtcaggagatcgagaccatcctggctaacacagtgacaccccgtctccactaaaaatacaaaaaattagccgggcgtggtggtgggcgcttgtagtcccagctactggggaggctgaggcaggagaatggcgtgaacccgggaggcggagcttgctgtgagcygagatcgctccactgcactccagcctgggcgacacagcaagactcagccaaaaaaaaaaaaaaaagattttacagttgctgatgttttcaggataacatttgaatattttaagcatgtccccataacttcgtaagagaattaaaatcagtcattacattatatgtacagctgtttttggactttctgtgtaattcacgtgtatctttggatgttaatttaataaacactcctttttctgcctgctaattcattctcatgctgaaaagaaggctactctgagtttagctcattgttgaaactgtttgctttaattcaagtagtctagtggaagaaagaaaggtggcatagtagcagttgcagaatgaaacctggaagagagaaagctatgtctaacaagggcagcagctctgagttgccagctagttagtagcagttaggatgagaagtgctgaccaacttttctgtattctgaaatcttagggtcaaaatatatttcatctgtgttttaactgtgcagtaggactgtaaagttttcacaatactttggcttttccatatttgtatggtttgtatttagttaatcttaataaaaayttagacttcaagaaaaattgggagaggaggtgtgtaattttgcttgctttctcctcgttggatgttgggtctcataactctaatattgagggtaaattttgcttttgtaaaattggactgaagctaagatcattccatgagaggttcagaagaacttgcacaagtgctagtaatcctgaaaattcatggatcttcagacattatcattcaacgcacataagaattaggcaccccccccccaccccactcaggcgcagtggctcatgcctgtaatcccagcactttgggaggctgaggcgagtggattacctgaggtcgagagttcgagaccagcctgaccaatatggtgaaaccccgtctctacttaaaatgcaaaaaaaattagctgggtgtggtggcgtgcacctgtagtcccagcaactcaggaggccgagacaggagaattgtttgaacctaggaggctgtcttggctcactggagtgcagtgagccgagatcatgccactgcactccatcctgggcgacagagcaggacttgatctcaaaaaacaaaaaaaaacaacaaagaggcacaccccaatcctttggtattgcagttaaaatactattttgtagtaatgtctgtactatacagtatcttctaggaatacgtatacacacacagaaatgcatatgcacacctacaaatgcataacatatacaaataagtaagtatatataatatatgtatatatcatttaagagtatatgtagctggaacctttgcgtcttttgagagagattaatgcctggagtggtactcattcaacaagtaggaacaaaatttgtttgaagtccaagtccaattaagaacaaatctgaggctgggcaccatagctcacgcctgtaatcccagcaccttggggggccgaggtgggtggatcacctaggttgggagtttgagaccagcctgttgaacatggaggaaaccctgtctctactaaagatacaaaattagcctggcatggtggcrcatgcctgtaatcccagccactcggtaggctgaggcaggagaattgcttgaacctgggaggcggaggttgcagtgagctgagatcacgccattgcgcctccagcctgggcaacgagcaaaactctgtctcaaaaaaaaaaaaagaacaaatctggtgctttagtcggtagctgttaaatcttcgagaaagtgtgggtcgttctttcatcataagtaaactcataccaacagattgtgaaccacaagaaggattctgcagatgattgtccggcagggctttttggcttaatttattttccacaggtttactcataaagttgccttgtcatcttaaatattctatttatgatggattttctggtttaatgtaatgtaatttcattgcctttaacttcttgtgttaaatttcttttctgtcaaaaataatcactacagattaattgaaaatggttcttgtatgctttacaagcagtctataaatattggagcatatacttatttgttgtttattatttcctttctcagtttgattgttccggtctcaacttctaagatgaattcaaaattggatccttaatacttagtctttcagtcttttcaaaatgtagtaaacaaatgccaaactttttattatagaatattctctaagatcagtttaattatgtattttaggatattggtgctggaaaaggcaaatactatgctgtcaattttccaatgwgwgatggtatagatgatgagtcatatgggcagatatttaagcctgtaagtattattgttttcacaattrgaatggaatttcagaatgttattggagatgctaacatttgttatcttgtgtgtagattatctcaaaggtgatggagatgtatcaacctagtgctgtggtattacagtgtggtgcagactcattatctggtgatagactgggttgtttcaatctaacagtcaaaggtaagcaattcaaagggtggtatttccagaaaaaaatggtttttcttccacccaagaactccccgtaaaagttctcattgtagtttcttgcctgctgttttaacactgtactctgcatttttcatggggttttgtctgttgtatgtatgactagagttattcttgtttcattatggcagatttatatatacatttatacaagactagttttttaaggtttattgtagtttgaacccaaggcagctatttttgaatggttgttgactcagtgtaaataaaacatgcatacttttttacttaattggattatttatttctcattaaggaagaagagggtttagctctcctcaccattttgcccacaacatacttgtacccttcccatacctctatttttacaaatcagaatttgattgtgatacttagtgtttacggcagcatctttaaacacttttcagcttatccagttgttctttgctgcataattgttcctaagtttctcatttgcttagttttctctccacttattgctgaactactggtgtctcagtatcttcatgtgttcagattcattgaatattctgtcactttcaccttcttgaaaaacagccttctcatctgttcatgtttggatgactatctttggtagacctggcaggacacatagctgttctctgctttttttctgttgtattggttctccctggtggctctgttctctgtccttaatttttttctcatgttttggtggagtgccttctgaagtagcttcctgataaaaagtgtgtgggggattaggagtgctgcagtacatactaaattttgatcatgtgttgaaatcagcatatgattgaaggctaggccaaagcaaaatatcaccattctggaatgaacttctagggtgtaagaataaatctgaaattttatttaataagatattataatgtatatgtagattagaaatgatttttatcatgagtgtttgtgtatgattttagaggtttttttccacgtgaacttttaggtagcaagttgacagtgtgctttgtattctctaagatgtggagaattctcaaatagaactttctccagaacaattgctggtcttaatggaattggataactaaatacagatattaaaagcttctttatttaatgttatgattgctactataccagctatattagaattatggtataatctgttattctatgttaagtggaatgatattaaattaattgtccctttgtaggtcaacagtggttgaaccgcagtttcatattgtaacttaatgtgttaataaccatcttttgcctcaaaatgtttataaactttctaaaatgatctacctaatgtactcttaaaagtgtatattaactatcagttttcctctttgacttgaaagtccttaatgtttttgtacttaatattttttataatcataaactgcagcagttcactcttagaaaaaaatttactttgtatttcagctaatagagtttcagttgcataaagcgtgtaaggatatttgtaattccaagtcttaaacttcattctgagtttctctgctgccagctttgattcagctttttcagatctgctgaagttagttatctcttttccatctccttgctgccatcagctatgttcttcctcttgtattgtctcccattcttcatttttacaaattttggcctttaaaaaaatccctttcgagtcatttttgtcaagttttgggatgaaggaaaagtaaacatctttgtttagccagctatctttacttggaagcctgtaagttaacttttagtatgtttgttttttctttaaaaatatccaaatggtttttatctgttaaaagaaacttttctagtagcaataataaaaattgagtgctagaattatgtaaatcacatgttgcaactattgaagaatgcttaatgaaaattcccacagtatacagttacatgaagagaacagataaactttgtaaaattaactctgaaatggaaggaaatatagaaaaacgatttttgaataatgtcatttttaggtggttagttttttcattgtccctttttaattttttcccaaatactcttcagtatgcacaaatgtcttttgtaattgaaggattttcttttcttctttaaagattgagttatgtgcctaactggtaatattccgagaagggaacttactggaaacttataaatgtttattgaattatgacatttatccacataaaatatttacttttatgttaggtttactattaatattaaatttctacacgtagaagttgaagtttttgaaaattaatagatgtttttaactcttaagttaggaaaactactcagtaccactacctaaagttaactcagggttaaactatgttgtttagctttccataattattttacacatgtccatagggaaagaaaagtcaataaaaattaatttagatgatacataatgttttattgtaacatgatgaatttcaccatgtaaccctacatgaacatctttctgtgttaataaaataggtgtatattcatattataatcttaatatagttgtgtacttgacttttccatcagggacacctgctaaaatagctagttatatcttaattttttaatatgtattattgtataacgtgtttggaaaggagttttagacttgacattttttacatttttatttgtttttaaaatatttagaaaacccattttggttgagtaacatttgcacttattatctttttwaaatttatttttcgaactgttgcagtatgcagattttgttgttacccaaatcttcttgtcttaggtcatgctaaatgtgtagaagttgtaaaaacttttaacttaccattactgatgcttggaggaggtggctacacaatccgtaatgttgctcgatgttggacatatgagactgcagttgcccttgattgtgagattcccaatggtaagtgttctcattacaatatctttattgtatgaactgtcaatacagatgctcctctaattatgttgcaattaggtcctgataaacccatcataagttgaaagtatgataagtagaaaatggatataatacacttaacctaccaaacatgacttagcccagcctactttaaacgtgctcagaacagttaggttaggcttcagttggacaaaataatctaatactgagcctgttttataaaaataaaacgttgaatatttcatgtaatgtactgaatacaagacattgaagttggtacaaaaaagccagaaaactgtaagtcaagccattgaaagtcagagactgtctgtatatagaaatagatggatgaatgattagagtaagtgccattctttataaataggagaacattcactttgtgttcacttttaaacattttcttaggaaatatttcaccacctaaatctggattctgtgcatggttttttgtgaaaactgagcttgtaatatgtaactttattttattgttttcattagagttgccatataatgattactttgagtattttggaccagacttcaaactgcatattagtccttcaaacatgacaaaccagaacactccagaatatatggaaaagataaagtaagaaatcattgaattgttttgataaacattttatcttgacaaagatttagtatgctttaaagggccaagtatgatgggtctttttaactttattagatattttgtttttttctaaaggatttgaaacattaagttactgattattcttttttttttttttaatttttaatttttttgtcaggatgggatattgcttggttgcccaggctggtctcgaactcctggcttcaagtgatcctgtcacctctgcctctcagaagtgctgagcttacaggcatgagccaccgtattcagccatttaatttcttcagttaatggaaataattttttttattagttgaaatgtattttaaaattgcaaggtgcactataagttattttcattgtctggaacattttgttaaggctttgtctccacaagcaaagtagagacattatagtacatagcatgggtttgagtcacctctgtaccacaaacaagctgtatgatgtttgataagttcacttgcctttgtgcttatgttttctcatcattgaaatggcaggctaaaataatgcctccttggccagtcaaggtggcttatgcttgtaatcctaatgctttggaagtccgaggtgggaggatagctttagaccagtagtttgtgaccagcctgggccatatagtgagaccttgtctgcaaaaaatttaaaaattagccgggcatggtggcatacacttgtagtcctaacgcgcagaggctgaggcaggaggattgccaggagttygaggctgcagtgagctatgatcttgccactgcactctagtctgggcaacaaagagagaccttttaatatataggtttagctagaccaaagatgaaattttttgctaaatattttctcttgcatgtaagaactgcaaagaaatttaattttgtctaataaactttgcatgtgtaatttagacagcgtttgtttgaaaatttgcgcatgttacctcatgcacctggtgtccagatgcaagctattccagaagatgctgttcatgaagacagtggagatgaagatggagaagatccagacaagagaatttctagtaagataatgcctttatttttccaatttgtcaaaatgataattgaaatggaaggttttagtggcctaagaacttcactataaagtcatgttcacgagcacactgttaatattgtcatttttgccactttcagagatttagcttcctgatgtctcagaacctgatttgggtgtcagcagtttcagtttgtatggctggatatacatatatgattgaaagttttcaaaaattagcaactttagtatatttggaaattaataagacatctcatttatctaaagtagggtgaactaaataactaaacatctgtttgattttacaacttctcattacacttaatgtgatggttagattgtagcataacagtatgtgtaatggtatagactgtctaacatatttggtattggtactttttttttggtctacttcacctctcagctctgaaataaaatgctactttttaagtaatgacattattcccatcccctattagaaaaacacacttttttcctttagagtttcagcatttttaaagaaaaagagattcccccaatttttattatgtgtttttgagccatttcttcatacatgaaagcaaagttttcaatattaaataaaccattcattccattcaaattttaaaatcattaggcatgttaccctttacgtttaaatgtggtaactaactgcttagtgcatttgtatgagtatgctgtaatgattataaaacctgtgactgtttttgtcaaaatttattaaaatattctgtgcagttcgagcatcagacaagcggatagcttgtgatgaagaattctcagattctgaggatgaaggagaaggaggtcgaagaaatgtggctgatcataagaaaggagcaaagaaagctagaattgaagaagataagaaagaaacagaggacaaaaaaacaggtcagatttgtttcttggtaattgtgttttaattgtaaattttaaaaattgggctgcattataatgtttatgctatcgagaagtcagttgcacaggtatcaggaggaagtatgctaggtaggtgactcttttttcttacatataagtggtacttagctcttaaagcttttatataaatgttattgttcctatttgctttagtaatacaggaaaccttattttcttgataacataggtttaaaatagtgaacattgcattgtgatatagattggttaagaaagaggacaaagtaattatgaatctattggtagtgcatggtcagaactgaacttctaaggtaatttttagctacctaaagcttatttaatgggagaaaacacaaagaagagttacatatccttagaccagttttgccattttgaaaaaggtcaaataatggattttgttcagaaattgaagaaaacattaaaaactctgaggaaagctaggaggggatttgggacctgggttagggaggaaaaaatactttgatacattgccttactttaaaacgctgtgttagctttaggcaattgaatttgctaccggaatctgttacctttcatctgacttcccagaacacttacacatgcctctgccattttatttaacacatcatattatagcacctcacaggattttgtctccctactagactgagctgctcatggctagggaacacagtatcttaaatatttgtattctcagcacttgatgcatttcctaatgcaagtaatggtgatgagcacacgttttagttaacctgttaattttgatcctgtagtatgtgaaaaactgatttagagataatgatccaatttttcctatgtctatcaaattgaagttatgtgaataagccagctttttttttttttttttaaactagagagttagtaatctataacatctgacacatttagttctgttcttttacttgtggattcactcctcaataggctacatacagaaatttataattttaacttcccartgtattacaatgatggcttcagtctatatttgtaactgattgacatccaaaaattcaagccatgactgaattaaggacgacttaactttagctgtaggattttcctaactttttttcttttctttcattttcactatgttttcttgtctgtctgtttttggtgttctcatttttaaaagctttatcttttctgtgcttaaaaaataaactctctatttggtgatgaggctctttcgatagggccttgcagttgttaaaattcttcagcctactgaaaaatgaaatactaccacagaaagctttttttaaatctataggtcaaaacctagagttagggccaccttttctccctctgcaccccaatccagtgactattcatagcttgtactgccatcgtttaggaaacacccaacacaaagcttatttagaccgaattcattaataataagattgcataactttttatattttaaaaataaagtatattttgaaataatatatatacattttatatttcaaaataggttttaatcttttcccaatctttatttttagacgttaaggaagaagataaatccaaggacaacagtggtgaaaaaacagataccaaagggtaaatgatgttccttatcaagtactttttacatactataaaaatactaaacatgtttattggtgtgtgtttgtgtacacacttcagaaatactagactgaaccttagaacatcattatgaggtgctctgaattttagtttgtattggtacataagacaacatatgccatcttacctattggtttatcagtataactatatcagtcagtttgtattcttgtacgtagtttatctgagacccttttttgctgttatcttttatatatgcacttaatggttttcatggtgttcttatttctgtgtacatgatttttttagtgttgtgagataggtaaatttaagaaacaattttaagtaaaaacagttgaggattttagtgtcagaaagcatgtaaatgtttgggcacacataattttgtgccagcctttacaggataacttggaatagtttattaaatcactagaaaaattaaggcattaattactccagaaacacttaagacattatcaattaatgtgtttcttagcatgagcctacaggacctgatcaatataataggtcagtgcatttaaaccaagattgtgccatttttaatatttcacattgcctcttttaacagaaccaaatcagaacagctcagcaacccctgaatttgacagtctcaccaatttcagaaaatcattaaaaagaaaatattgaaaggaaaatgttttctttttgaagacttctggcttcattttatactactttggcatggactgtatttattttcaaatggctttttcgtttttgtttttcttggcaagttttattgtgagtttttctaattatgaagcaaaatttcttttctccaccakgctttatgtgatagtatttaaaattgatgtgagttattatgtcaaaaaaactgatctattaaagaagtaattggcctttctgagctgatttttccatcttttgtaattatctttattaaaaaattgtacttggattatcttttgtctgtttattactacaatrtgaagtcttgtttcagtggctaatgacatcatttctgtagacttacaatacactctaggtgaaagataatgattacagcttgaaagataactatttgctgtttctttgggaagagtatttatagtaattattacttatctttgcaatagaaattctaccaccttgccctctatagcttagccagttagtatcagtgaagattaacatcccattacaatttatgaaataatacagactctgcaattgagatgtaggagttctttgagttgacccaaagattctcaaaattgaaatggaaattctgaattgaaagaagaaactgaccagaacttgtattgaccagacttgcctatagtatattgctggtttaaaatggaacctgcagacaaaacctgtttcttttactgcatttacatggcatccaggttccattattatttacgtgacatccaggtttctaactcaaggaaataaacacaactgatttatcattcagcaactacttattgtgtgtctgcccattttaagactgtaggagtgtaactgaatataatggaaaaatgctttcactcagagcttacactcagagcttacattctagtagcaggaagcagacaaatgggggtaactcctgctactaagatgtgcaaagaagacaaaacattttaggaacttgccaaaatcagtgaaatctccctttttgtcaggcccacattgattcttttgagattaaaaattacagaatgccagaagataattcagtcaaaagtatttctcttcagtgcagtaaaatattaaaagaaaaaatatttctctacaagcctcttaaatgtttcagacattcacaatagcacctagacttttgtaatgaacagctgtgcacccaccccgacttaacaaatattttacttttgctatatttgcttcggtgtttttttcttaaaatacaccgaaattgaagctctctttgtgtactttgtcgtttgtaatcctccctccctcccagccttaagaagtaatcaccattgtgattattttatccatgtttttgtgaatattttacccatgtttttgtacttttgctacatatttgttatcaatctgtaaacctttatgacattaggaactaagaaacttagtcccttcgttagggggataatgaaatgtatttagtgtttgtgaaacatagatggtatgtatttggacaattctgtaactttgctttttttatttttatttttccatagcttattggggaacaggtggtgtttggttacatgattaagttctttagtggtgatttgtgggattttggtggacccatcacccaagcagtgtacactgcaccctatttgtaatcttttatccctcgcccccctcccaccatgcctcccgtctaccatgatgatcctgttttaaataagaaaataccatttcgcaggctccagatgttctggcatcctccctgtggatttcccagtgcctgcagctcacaggacaacaggggctgtggtagagtcacctatgagatcctggagtagtggatggaggagatggaacagtgaagacggaaactgagctcagtatccgggtgccaggagacaaaggccctttgctttttttcatttaatattctgatctacccctgttgacacatgttaagtatagttcattttgactgctatgtattatgttccattgtgtgaacatactgaaattgtacacttcaatactatactggatctccttgggtgtatttaagaggttttgtttttctaagtagttggttatatacaactaaaacctcaagagaactatctaaagcaatttcagcaaggtgatttggtacagcattaataaacagaaatcagtaacacttagtgaccaagtctgttggaagaacaaagacccccatttgtaataacaaaatttttagaaataatatgtaaagaagctatggttcttgtgtctagtaaggtcaatgtaacatagtaagatgtcagaataccctaatactttaaaaaattcatataggataaaaatgatatttgaaattggcaaggaaagacattattttgtaagtggaattgggacaacaactggtaaccaaatggaaaacccagttttctgccctccactagaagatttaaataggaaaagataaaactaccaaaaacctaaactcttaaagcaaatggattgaagaaggcctaagtgtgacaccaaactcaactataaaagatatatttgataacaaaaaaaaaattagttcagtggaccaacaaaaacttagaagacaagtcaagaaaaatgacaaaagacagagtgggaggcagatttgtaactcatccaggtcaaaaggctcatatctaaagatagtagaggaacaaaatgtataaggatgtgaactgggaaacaaatacatataaatagtttgtaaatatgaaaagatctttaacctcagtaaataaaaagctatagagagacttattttttaacttagttttttaaacctattatgtttatttattttttctttttttgagacggagtctcgctgttgcccaggctggtgtgcaatggcgcaatctcggctcactgcaacctccgcctcccaggttgaagccattctcctgcctcagcctcctgagtagctgggattacaggcgcctgtcaccacgcccagctaattgttcgcatttttagtagagacggggtttcactatgttggccaggctggcctcgaactcctgacctcatgatccacccaccttggccttccaaagtgctgggattacaggtgtgagctgccgcacctggctgtttatctcttttttttagagaaaggatctcggtcacccaggatggagtgtggtagcctgatcatatctcactacatcttagaacttctaggcttagggtattctcccacctcagcctcccaagtagctgggactacaagtgtgcaccatcacacctagctgatttttacatttttattttggagagatggtgtctccctgtgttgcccaggctggtcacaaactcctaggctcaagcgattctcctgactcaggcatgagccaccgtacccggcctaaacctatcatgttacagacttagaaagcaactattgtcaagtgtttgaggaaactcaggtcaggtttggtaaactaagatattaactcaagtaaagctctttaattcatttaatgaaggtgccacattgtctcagttctctatggcatgggtgaatgctgttctaagtcagcattggtactctaagctagttacatcatatctaagctttgcccttctaccagagctgctagcattctgtcaatgggcaattatttgaagttcttacattgaagttagtcacctacatcttctgttttttatggttttgatgtagtaatactgctgaagtttttttgataactgcgattcataatatttgttattcatattgtgatataaatgataagggcttttgaaaacaagtagtaatcatttcaatagcttaggatctccaccataatcttaggaaaattactaacctctgtgcctcagttgcttcatcatttaaaatgaggaaaataatagtccctacttaataggtttgttgtgaggattgagttaataacatagttaatgctcagtaagggttagctgctatttttttttcttttttttttgaaagagtctcactctgttgcccaggttggagtgcagtggcatgatcttggctcactgcatcctctgcttcctaggttcaggtgattctcatgcttcagcctcccaagcagctgggagtacaggtgtgcaccaccacacctggctaatttttgtatatttagtagagacgggttctcaccatattgtccaggctggtcttgaactccttacctcaaatgatccacccgcctgggcctcccaaagtgctgggattacaagcatgagccaccgcgcctggcttgctattgttatgaggtaaaggtagatagatgggtgagagtggtgccaggggaagtgttaaatttttgagtgttcctttagatgccagatgggttgtatctgagccttttattgcagtttgatgcctactagtgtgaagactactaggtcatagtggatagagaagcaatcttttggagacctgattttagcaaggatacgaataatatttgacaactttggggggatcttgatgcctctgtaatttactcaaggataatctcaagaaaaatggcattaagtagattacagaaaaaatagaactatcatattgttattattggctatttacatgagcaatgcggagaaatgtttaggattacagcatttagaagcttctcaattgctgcatttcctcactgtaccacaagatggcagatactgcatttaaaatttttttttctgtgtgttttctcttatagtcacttggtggccatgtaacaagcagagcaacatgtattaacagattctttttgaatgcaatattggattaaaaactttgaattaaactacaattaagtttactgatttaggttttcctataagaattataacactaatttctaagttttacatctgcaaaacacagtagagtgtatctggtagtcattgactaattgtgactttgctagtcagacaaaatggaactgaatattagagccagaataattttctgttttgactggtggtaagaatcagttagtatacagaatgggaaagaattgaaatttatttctaggaattatagttatagtgaagttaatattcaggggcattgggtgcttgttccacgacttttgtttactgaactaagtacctaacccctttggtctttgaacactgcagagttatgattaggattattaatgaaaaattcttttttagtagaacaaacagttaaggacagaagacaccttgattagattctgttatttgctctttttattaagattgtttttactctaaatgttaaagaaatgtataattatttctaaggtaaaatgagtagcaggattctgaataggagattttttttggccagacccattttgcagccagtggtttgtatttaggagtgagttgaacaaagaagactctaatctgtttttgtgttgtggattttttattctattgataaatcagtagcttccagcttctcttgtatcctctactagtcatcttttttgtttcttcagaaataaacatccagggtcacttccctgcccttgccatatacttactaggatgatgtacaggtaaaacttttaaaggaaagtacggacaggcaattcctaaagtaaaagagagcacattatcaaaactggctgtacttaacaaataccaacaaaaagtcattacacttctggcaacaaataatgtttgatttaaaaagacaagaatttccccttttgctcttattttttaaatatgctatgtccttaagtgagaaatgcacttcaaaaattttcttattctgaagtctagccggaaagtttgaacttgtgttgcctttggctagactaggtgaaattaaggggcttaagagggcactgttgtgtggccctgtggtagataatagccctccaagcatgaggatgggagatctaccattcaccagtatttccaaagttatattcttaaaaaggctagatttctaatttccgtagaatctaggtatgttcttttcaactcagcatctgataagaaagtttgggcaagtaggtgcgaaaaatttactctagataccattttccaggaaaaaatataattcaagtccaacgtattactagctgtcaccttccccaacaatcaaataagcattgttattgtcaaacacatttacttgtatagttcagtgttatatgtaatggacttaggtataattcctgtgctattcccttttgatgccaaacacccttttgtaagctgttttgtttgaaatccaaatttatatgtcttaaagtaaatggcagcattgggctttcttaatgtaatgactcttctgccatcctatttctagagttaggcagaaaattctgtaaatctatcttatttccagtctgtttgtgactatggtgggcaataaatctgatttcccagaaaaacacatctggacccctataggtaaggtaaacaagcctcatcttaaattgtttgtacttccgacctgacctcaaaacaccat

SEQ ID NO: 94950 - DNA, 26860 bp, Homo sapiens
  misc_feature (1)...(26860): n = A,T,C or G
cagggaccagggtcactgaccgtacagggaggaataaagaggcctccttctgcctctgccaggtaccgccgcttcctccgccctcgctaccgtgtggcctacaagacagtgaccgacatggagtggaggtgctgtcagggttatgggggcgatgactgtgctgagagtcccgctccagcgctggggcctgcgtcttccacaccacggcccctggcccggcctgcccgccccaacctctctggctccagtgcaggcagccccctcagtggactggggggagaaggtgagtgtgggagctgctgcgagggtggcaagttccaaatggtgatccaatgcaatgggaaatgtggggccaggctgctgggggagtcccccgtgctctatgccagagagaagagaggggcagaagggttagtgagatcgcagagattccctgcccgtgtgtgtgtgtgtgtgtgtgtgtgtgtgtgtgtgtgtgtgtatttgtgtgtctgtgtgagagagagggagagagcacgcaaaagatggagagactgagaaaaagaaggccaaaaaagagaaggtgctcgcacacgccccatgtggccaagatccttcaaacagctgcaggagaaaggggcattcctttgagaagcttggtccgtggggacagacagttgagactacaaatcctagcatgcattgcacctgactacagatcccagacccctccgtggcctctggagaccgcaggtcccagcatgcagcagttcctgtggcttgccttccctcctgcgtgctgcacaccggatgtgctgtttccctgccccgagatagccttactataattatgcaaacaggaactcctggccaactctcaccgtccacagagcctcttctttgtccccgtggtgttgcagggaagtgtcacccagtggtagctactgttgtggcatccagagtgcctccctacactcccatttcgcccctcttgacagccccatgacagaagagtgtcattatcctttcgcagaagaggaaagagtttccaagaagttaagaggcactctgggcaggtggaaaggacatggacctgggggctggatagatggtctgggtttgaaacttagcactgccatttattaaacctgtgatccatggccaggcacctaatatctctggtccagtttcccagcctatatgatgggaagagttcatggtatctccccaggggagttattgaagaacagagccatggttcatatttggcctagaggcattcagtgaatggagtttctttttttttctcttgccaaaatcacccaaaggagaggcagagccagcctgggcatctgacccttgctggagctggggtgagcaggggccttgagctctggggtccagcccctctgccttctgccttcccctctcctcaggtcctggggagtcagagaaggtgcagcagctggaggaacaggtgcagagcctgaccaaggagctgcaaggcctgcggggcgtcctgcaaggactgagcgggcgcctggcagaggatgtgcagagggctgtggagacggccttcaacgggaggcagcagccagctgacgcggctgcccgccctggggtgcatgaaaccctcaatgagatccagcaccagctgcagctcctggacacccgcgtctccacccacgaccaggagctgggtcacctcaacaaccatcatggcggcagcagcagcagtgggggcagcagggccccagccccagcctcagcccctccgggccccagtgaggagctgctgcggcagctggagcagcggttgcaggagtcctgctccgtgtgcctggccgggctagatggcttccgccggcagcagcaggaggacagggagcggctgcgagcgatggagaagctgctggcctcggtggaggagcggcaacggcacctcgcagggctggcggtgggccgcaggccccctcaggaatgctgctctccagagctgggccggcgactggcagagctggagcgcaggctggatgtcgtggccggctcagtgacagtgctgagtgggcggcgaggcacagagctgggaggagccgcggggcagggaggccaccccccaggctacaccagcttggcctcccgcctgtctcgcctggaggaccgcttcaactccaccctgggcccttcggaggagcaggaggagagctggcctggggctcctggggggctgagccactggctgcctgctgcccggggccgactagagcagttgggggggctgctggccaatgtgagcggggagctgggggggcggttggatctgttggaggagcaggtggcaggggccatgcaggcatgcgggcagctctgctctggggcccctggggagcaggactctcaagtcagcgagatcctcagtgccttggagcgcagggtgctggacagtgaggggcagctgcggctggtgggctccggcctgcacacggtggaagcagcgggggaggcccggcaggccacgctggagggattacaagaggttgtgggccggctccaggatcgtgtggatgcccaggatgagacagctgcagagttcacactacggctgaatctcactgcggcccggctaggccaactggaggggctgctgcaggcccatggggatgagggctgtggggcctgtggcggagtccaagaggaactaggccgccttcgggatggtgtggagcgctgctcctgccccctgttgcctcctcggggtcctggggctggtccaggtgttgggggcccaagccgtgggcccctggacggcttcagcgtgtttgggggcagctcaggctcagccctgcaggccctgcaaggagagctctctgaggttattctcagcttcagctccctcaatgactcactgaatgagctccagaccactgtggagggccagggcgctgatctggctgacctgggggcaaccaaggaccgtatcatttctgagattaacaggctgcagcaggaggccacagagcatgctacagagagtgaagagcgcttccgaggcctagaggagggacaagcacaggccggccagtgccccagcttagaggggcgattgggccgtcttgagggtgtctgtgaacggttggacactgtggctgggggactgcagggcctgcgcgagggcctttccagacacgtggctgggctctgggctgggctccgggaaaccaacaccaccagccagatgcaggcagccctgctggagaagctggtcgggggacaggcgggcctgggcaggcggctgggtgcccttaacagctccctgcagctcctggaggaccgtctgcaccagctcagcctgaaggacctcactggtgaggggacaaaaggcatgaggggacccctttcaagccccttatttttcttctccctcccccagcccagcttccaactcatctgctttctccttgcttttcccaacatgaattgcagccccagccagtattccaggtgttatagtttgcctgcaagagatgatgcaaggtcctagctcccgccctccctctggctgctcactaggcctgtgggtggagagaggatgttgctctgccagccagggatccagcatatgcagcaagggaccccatggccccctcagcctgcaaagctccacctgttccatccatcttctccctgttcatgaagccaccacccaccttccttacccattggaaactccttttatggccctccttcaactcaattttgtcactgtagggcctgcaggagaggctgggcccccagggcctcctgggctgcagggacccccaggccctgctggacctccaggatcaccaggcaaggacgggcaagagggccccatcgggccaccaggtatgtgcactgagacccttgctgcagtcagggttgccactgccccctccaaccctgacccccgctggcagccccaggcttgacattccactctgaacttgacaaggggaattgggtactacctgaccgataagggaaaatcagaggaaagtgaggaggaactgtgatagtcactgtgtttggttaatgggtattaggaggctaatggataatgttggccccactgcagtactggagactaaagctgagtctattatagctgtctggggtgtgaaaggctgggatggcccagcagttgaacagaatggaccctacctattcctgtttttcttgataccccaattcctgctttgaagtccacgtagcaccgagcacaacaggagagcctcagcagatgtttgctgagtgacttagtgagagctgctttatttctcactgctccctttcctcttctcacaggtcctcaaggtgaacagggtgagtgcctttcatttgattctggagggagaagtgactaggggttggaggatagaggtcctcgggcagccctgggctggggatccagcaggggaagggggctggcactctgccctgagcatcccctttaacatccacccttcccactcaggagtggagggggcaccagcagcccctgtgccccaagtggcattttcagctgctctgagtttgccccggtctgaaccaggcacggtccccttcgacagagtcctgctcaatgatggaggctattatgatccagagacaggtagtcctgggaggggctgggttgaacggttggagaaatgggtgaggtgtgcagtgatatcttcccattcttgccttttccgacagtgtgaatcttcattctctgatttggggagaccccggctctttcttcatttattcattctcaggcagtggggagaagaagtagtcattcattcattcagcagatctttactggggcctgctcctgcccaggcactgttttaagtgctgggaatgcatagtgaacaaagcccccagttccctgccgctcacattccagtgaggtgaaaagacccagagggtccctcctcagtccaggagttctggtgcgctccccggagcttccctggcccccctgactgctatccttgtccccaggcgtgttcacagcgccactggctggacgctacttgctgagcgcggtgctgactgggcaccggcacgagaaagtggaggccgtgctgtcccgctccaaccagggcgtggcccgcgtagactccggtggctacgagcctgagggcctggagaataagccggtggccgagagccagcccagcccgggcaccctgggcgtcttcagcctcatcctgccgctgcaggccggggacacggtctgcgtcgacctggtcatggggcagctggcgcactcggaggagccgctcaccatcttcagcggggccctgctctatggggacccagagcttgaacacgcgtagactggggtcccgcccgacgtgtctacgtcggctgaagagacagcgggggcggcgggctcctggggtctcgcctgagacggggcacctagccctgggcgagcgccgcacccgggcccgcagcggcaccgcgcccagagcggcctctccccacgcccggggcgcgccggctcagggaggctcggggccgcccatgcagacttttggcctggcgcgatcccccaagaacccctccagggccggcctgcggaggagccgatcctcgcaccctccgctccctccactggccctccaggtcgattccctgggctccaggctcccccgcgcgggcgccgcccaccgccatactaaacgatcgaggaataaagacacttggtttttctaaaaaaaactaaacgaaccgttctgctacggtacggggtcgggggctgccgggcgtgcacagggcacggggcgggagagacgacggcctccggagaggaccccgggttccgcactgcgttcgccgcctccgcccggctcgggacggctcggggttggctcaggcagcaagcggcgcccgcccggctcctgcgacgtctcccccgtgtcacgcccgtttcgccggcgtccgccagggggcgctctgcgttcccgccacgtgaggctgcggcccacccggcgggtcctgctcctccgcggcggaggcgtggcctcggctgggactaaccggggcggggcggggcggggcggggcggggccgccgcgaccgcgggcttcaggcagggctgcagatgcgmggcccagctgtacctcgcgtgtcccgggtcgggagtcggagacgcaggtgcaggagagtgcggggcaagtagcgcattttctctttgcattctcgagatcgcttagccgcgctttaaaaaggtttgcatcagctgtgagtccatctgacaagcgaggaaactaaggctgagaagtgggaggcgttgccatctgcaggcccaggcaacctgctacgggaagaccggggaccaagacctctgggttggctttcctagacccgctcgggtcttcgggtgtcgcgaggaagggccctgctcctttcgttccctgcacccctggccgctgcaggtggctccctggaggaggagctcccacgcggaggaggagccagggcagctgggagcggggacaccatcctcctggataagaggcagaggccgggaggaaccccgtcagccgggcgggcaggaagctctgggagtagcctcatggaagagaagcagatcctgtgcgtggggctagtggtgctggacgtcatcagcctggtggacaagtaccctaaggaggactcggagataaggtaggggcgcccaggtcccctagggraccccaggggctgctgcagtccagcatttgtgccagcgaccgaggctgcagagaccccgcagtgaggccctgagaacccggcttcaaggccggacccgcgccctctacccgggaatcctgggggggctcccagcatgacagaagagargaaggaattgaggcctttaataagaagacccaggatttaatagcatcgtgttagccaatttccatttcaactcaggcatcaggtgtcaggtgtcaggcatcaggatccccattttactgataagtatagattcagagaccaaggggcttatccaggggcacacagctacctgcttctgctgtttctttttaaaccccaagcctatgcacttgcctctcatcaacatttacttctaacttatttatccacatatctcgcacctatttctgagaaagatttgaggtagcttacagtaaaaagtatgtacagttaaactgttggagaacatttaagaccatggtatttgagcttcaactatagctcagggcttgctggcactggaggcaaacatgagatgccatgggttatgtatggatagagctggttcatgagccctggcaagctttttcctggtgctaaattccaagaggagtttaccagaagtccttttcacagaggtcaatgaacaccgtttagtagtgggaaatatctttctcagttgtctgctagaaactgaagagtcagttgttggttctttttttttttttttttttttttttttgagacagggtctcattctgtcgtccaggctggagtgcagtggtgcaaccatgctcactgcagccttgacctccagactcaagtgatcctcccacctcagcctcctgagtagctgggaccacacatgcacgtcaccatcccagctgtattttaaattttgtataagggacgggttctcactatactgatcagagtggtcttgagctcctgggctcaagcagtcctcctgctttggcctctcaaagtactgggattacaggcatgagccactgcacccagccgatttgttggttctttttctttttgagacagagtctcgctctgttgcccaggctggaatgcagtggcatgatcttggctcactgcaacctccgcctcctggattcaagcgattctcctgcctcaacctcctgggtagctgggattataggcatacgccaccatgccccactaattttttttttcttttgtagagacagggcttttctttgtaaagacatgttggccatgctggtctcaaacttctaatctcaagtgatctgcccgtctcagtcccccaaagtgctgggattacaggcatgagccaccacacccggcttattggttcttgtatttcctcttgataagggccccaccattacactgtaatgctgtgaaggcatttctgtggggcgggacactagctttctcttggtgcagtcagtgagtgcttagaacactgagaattgctcctgggctatatcagttgtcgcagctaagaactggataagaggcagttcaagactgaactccacaaagacacgacagtgctgatggctgccaggctaactgaggtgagagaccccgacactcctcaggctttggggccacaaagcaccatcacatatattattttatactctcctcccagcagcccatgggaactgtgtaaagatcagtgaaatcctttatacagataaggaagctgaagatttggagatgttttttaaggccacggagttaaatggtggcacagtggcagctgcagctcgagtctcctagtgtggagtccagggtccctgccctctgtcatctcctgtataccctgtccctttgctgttgaccatctcttggagttgaccctttgctttggtttgccagaggttagggccccttgccaggggtgcagggacagtggggaaggggcacgggcatgccactgtgtagacctaacccactgtgcaaggtcgaggcagccacaggacatggcactcagtgaggagttgggttcatctcaggggaacagtgcaaattccagggccacaggttctccaaggaccgtggagagcctgggaaaagactcagcgcctctttctgtcagagctgaagtcccatttcctctcagcttaattctgtcgggaaggtaggagaaggaggtcctgctagcacccacactgatggggcaggttctgaaggtgggcactgagcgaggcacttctctaaagggccccttcccatgtccatcatgcttcctgcactccaggccatgccttccccgcagccccatggccctggttccctgcagcctggctcctgaactgttgtgcctcccagaggagcacatccgagtggggacccagtccttcctgggtgtctcagccccacctgtcctagggtctctgtgcttgacaggcagttggggactcttgggagccgccacctggagctcagccagacccctgggacgtgtccttttttttattttttgagttggagttttgctcttgttgcccaggctggagtgcaatggtgcgatcttggctcactgcaacctccgcctccagagttcaagcaattctcctgcctcagcatcccgagtagctgggattacaggcatgtgccaccacacccractaattttgtactttcagtagagatggggtttctccatgttggtcaggatggtctcgaactcccgacgtcaggcgatccgcctgcctcagcctcccaaagtgctgggattacaggcgtgagccaccgcgcccagcctttagctgagcatttctgcacaggaaatatcagtgtgactttgaagggtttccccagagtaaaattctatatcctttcttagaaacctcaatgcttgggcctaacaacttttagttttaaaatacggagtaattagcaatggctttggggtcaggaaattgggttcccacatcagctttgtccttaactattgatcaagtcagatccctcgagattcctccttttttttcatatcttttcgtaaaaatttctgtaaagctgtaaagctcagcttgaaaatcttttttttcttttttctttctttttttttttttttttttggagacaaagtcttactctgtcacccaggctggagtgcagtggcatgatcttggctcactgcaacctctgcctcccgggttcaaaagattctcctgcctcagcctcccgagtagcagggattacaggcacctgccaccacacccggctcatttttgtatttttagtagagacagggtttcaacatcttggccaggctggtcttgaactcctgacctcgtgatccacccgcctcagcctcccaaagtgctgagattatgggcgtgagccactgcgcccggccagcttgaaaatctttgaccagctgggtgcagtggctcatacctataatcccagcactttgggaggccaaggcaggaggatcgcttgagccgaggagttcgggaccagcctgggcaacataagaagatgccatctctacgaaaaaattttttaaattagcggggcatggtgatgcacacctataatcccagctacttgggagactaaggtgggaggatcagttgagctggggaagttgaggctgcagtgaaccatgatcatgccattgcactccagcctgggtgacagagtgactctgtctcaaaaaaacaaaaaaattactatcctttgtcattgttgttattgttgtttttgagacaggatctcactctgccacccaggctggagtgcagtatcatggctcaccccagcctaaacctcccgggctcatacgctcccccaacttcagcctcctgagtagctgggaccacgggtatgcaccaccatacccagctaatttttaattttttttttttttttagagacaagagctccctttggttgcccaggctggtctcgaacttctgggctcaagtgatcctcctgctttggcctcccaaastgctgggattataggcataagccactgtgcctgtcctactatcattttttttctaatgacatcgtgctccccttttcccaaaactgaagtttcgcgtacaaatatgctttggcctaaaaattctggttcggttttttctcttaattcgtggttctttggtactgttccttttattgtaaactgccacaattattattattattggaactggcacaatagaaataacaccaccattcttacctcaaaggtaataacattcattaatgatttctcatttgggctccagtaacactgtgaggggatcagtgcgttgaccctctatgtggaagttatcatttttgctgctgatgacaatgaagcccttcacgtgtgtcttgttagtttccttttggttggtttttagtaaagatggagaagtgctccctgctgccacttcttaaacgaccaacgtccaggtttgctgtcctgtcttactcgtttgattttatagctctgcagtttctattgaagtagacactcctaacacaggggtaggtgtaaatgtgatacctttgggaagaggcacttagtccccgaggtccttggagttgctccagctctcaaggaggaggccaaaggtgcagcgtctggagcagctctgactggggtgaaaggtgaggagragatgacctggagttagtgggtctctcgaatagtgatggacccaagtgagtggtttcctgttgccctaggaacagatggaaatattgaaaggaactgctgtcagcttgaatttagcctgggctggggaggtagacaccrctctcagccaagctccttcccttggccggcctcggctgccccrggtacaaagtgagacgtcggcctagatgctttctgagaggagtccccagctgttacattctgtaggcccctatacaggagactgtgcttgggatcagcctgctggggctgcagggaccctccctgtgctttgcaggtgtttgtcccagagatggcagcgcggaggcaacgcgtccaactcctgcaccnttctctccctgctcggagccccctgtgccttcatgggctcaatggctcctggccatgttgctgagtaagtccaggagggagagcccactggggaaggcctgcctgcatcattgtgggagaagaaggatgtatccaccctgggtggatgggggattagaaatgggttgtgtccagcagaaacgcggggagggggcatggcggagcaccagacgcccagccctgccttggcgtggcctctctgcggttcgggggctgatgctgcccctgtgaagctttccttgccacagcttgtttcctggacacttctggagcctgcttcagcctcttcctttctccttccttgcttcctgcagactctgcggtggatgtgcctttgccttatcttaagtcccttatcctggccatgcttgaggcagaaggcagttagggacacgtggtacccatcctcccccaggtccaggyccacagtttctgtcccagttgagaggcagggctggtgctcatgtccctgttgttcactgaagcagtgagagtaccctgttcaaggacaccctgaagccacatgctaaagctgggctcagaacccacacctcccagttccccggctgtcagggctatagccctaaatggctcatgcacgccctccatgttggctgctgcagggacctcagagccctttgacccctggcgctgcygactcagcaagcacttatcgggaggtgaggcccacactttgcacactgtgggcacgggggcaggctgccaggttgctggcctgtgaagggcagccctttgaaccctggtttgaagggggctgctggcagagtccaaccacctgagctacagccaaactccctgccttgatgaactggcaggaagagaatagagggagagaatctgccctgtgagatgggacaggacggctcagaaccaagggctggtgactcattaaacctctttaatagctcctttcctctgagctagaggcaggactgtggctctggcttaggatggtcgactctcctttacatagcaatcaggccaatgggtggtttattcagaattctccccatgtgctcgacaaacatttagagagcacctaccatgtcccaggcactggggtgcgaaagttatttggcaaaccaaaccatatttccaatgctttgggaaagttactatttaaaggagttgtaagtcaagggatgatgccctgacttggtatctttatgcaaatctgtattatccagctttggtgttgctgaaagcgggctctggccaggtgagaaaagccaggatggtggctggactgctgggcataattgccagttcttgagcacagaacaatgcctgtccatagagggctggaagggctggggctgacctccttgtccttgcccctgggctcactctgcatggagggcattccaggagagagttctggaccaggcccatactgagtggcatcaggcacggggagccagctgattgcccaggagggttcacctggctgcaggaggacaaagcagtgagctggctcaccaaggcagcaccacttccaggctgggcctcctggaggcaggcagagagtgagaggaatcacagcattaggactgggagggactgagagaggacagcaccctggatgagcttgtggaggacagctgggggcaaagtattgccttggagattaattattaatcctgtttgggcattgcaggaaacaagccacggtgcccccacatgcttggttcaaacagtgtacaggttctagggtcctgtctagctttatgaacaggagcaaatcctttccagcatgagttggactgaaaaacagagtcaggatcggagcatgcttcagccaagacctaaaaggatggcccttagtgtttctctctctgagctccaggctctgcactcctgcatctcctgccctgttgcactgcctgtggcaagactgtgattcccagttctctcccagccccctttgcttgcacccctgcctttcagggtccctagtggccctgccagctaccctccagtccccaaaacccttgtcgaactgcacccccttcgggttactccgccctrgcagttttgtcctggatgacctccgccgctattctgtggacctacgctacacagtctttcagaccacaggctccgtccccatcgccacggtcatcatcaacgaggccagtggtagccgcaccatcctatactatgacaggtttgtacaactgtctgtgccttgccagctgctgccgccgccaccaaaactcccagaacaggactcttcttctcttagaggctcgtgtgctccagcaccctctccccactccttttggaggtccagaccacttccaggctctaatctgtgtctccttgcccttttcctggcccggcctccaccctaagcttcctggtggccgacttcaggcggcggggcgtggacgtgtctcaggtggcctggcagascaagggggacacccccakctcctgstgcatcatcaacaactccaatggcaaccgtaccattgtgctccatgacacgtaaggcccccgggcctcgccctgctacaacccaccaatcagttggctcaatcagttccctcactcgccaccatgggcatcccaactgcccccctctgtggcttctgtgtaccagaagttgctcccctgccaaaatgtccagtgatttcctaattgctttcaattaggggaaaagtgaggtgggaagggatgggctttgctgtgcctggtgacttggccttggtcaacaccaaagaagggcaggcaggcctatataaactgtaatttattaagtgattcctccataattattaaatcgttaatcagcagcttggctgtgggtgcggggaaactgttctcaggacagaagggtgggagatgggattcaacccttcttaagaagggctgtgggggggtgcccactgggatttccaaagtcagccccagagttgccagcctgcagcatggcaccaaggagctggggtttgggtgtgtaaaagagatcagccccccaaagtttccagcatgatgaagccaggccacacaccattcacagccattgctgaaggaggggaaaggaaacatggggtcagcagatcagggtcatctaacatggtgctgacctgggggaaggggctatccctcccttcagggtcccaggccactcaagagaggccccatgggcctagacacttcttatcccttgcagactccctcctgcaggattttagaggtttagtgtactaagaacctagtacgtgccaggtactgttatggctgagagggcccaagcccagcagccctcaggttcaggctgttcctacggcccagcctgactgccggacctggaggaggggcagccatccctgggcttcatatgtgcagtgagtgtgagtaggcaggcatatgtgctacaggtgaccttcgcattgggcaatcctagtcaaatgcttgttaagcaacaatccgtagtaaccctgatcaaggacacaacatagctatttacaggagaggagctctgaggagaaatgtttcttgcccactggcctcagtccaggcacattcacacacattacctgcaactgcagcaggctgcaagggggctgggggtttcagccccatttatcaatgtggaagttgcctcccaaaggcccgggcagatcacacagctatagttaagtggaaggactcggctacagaacgtggagcggggactttggctgagttgaggtctctggctcaggagggtcaaggcagacctctatcgggagtcccctttcctaaaccggccaaacacaaactcttcctcaagtgctaccttgacctcagggttgcaacggggagctattaaacgcaggacaggggtgccataggtaaaccccaacgctggggcgccagaagtgagggggaccagacagcccaggcagggggtcgcgggctttatactttcccagggctctgcctgtgggagccgtgtgctgctgcaagggattctgggaagtgtaggcttggcgctctcagtgcattctgggagatgcagtctccaaggcacacagaccttgccagttgacatgtgttgcagttcagtttaccgagataatttaatcacaacctcaaactcaggaaagggcaccccagcagactgtaacagggacaaccctggagctgagcctgagaatcctgtgctgtggatccagcttcctgtcatgctgccagcagtgcaggcacagggtccacagctgccagttagagatcctggctctgcctgaccccatcatgctccttcttctctgtcttttccatcctgtgacctaggagcctgccagatgtgtctgctacagactttgagaaggttgatctgacccagttcaagtggatccacattgaggtaagccctgccttacctgtgtttcaaggggctcaacctgccagcctcctccacatgttctgcctccttggtttctttgaatcatgaagtaccttagagataaatgaacccaaccccctcattctctctccatctttccttatgtcttcaggtgagraaactaaggcccagaaagaytagatgacttactcaaggtcacacagcagaacgtaagcacagctggctccaggcaaagtcctgtgctttctgtgctacgggctgccccattgcctccaactctgcctctggcggatgtctgactgcttagggcctgacccattacctctggggaagcaggaaggacagggcctgactcagctcccaaataaagggaactagagcctttactccaagagaggttttggagtctgggtggaaggaaatcctgagaagtcctgagttctagctccatcatttaacctatggtaggtctttcacagtatcttttattctttagtcttctcatctgtggaatggagtagctggttgataaggtcttcaaagtccacgacagctctgaatgttgtaatttaggatggggttctagcccagcctccccgaggccctctmcctcctcacccagagtttcagcggggcaggaagaatgaggcagattggccaggcagtgcccagcggtcctgagctgccctgtcctgtaccagggccggaacgcatcggagcaggtgaagatgctgcagcggatagacgcacacaacaccaggcagcctccagagcagaagatccgggtgtccgtggaggtggagaagccacgagaggagctcttccagctgtttggctacggagacgtggtgggtgccccattcagcctctctttgccacttccagctaatttggttcttaaagggagccagaatccttttatcctgcctaccacaattggaatagtggttcctggtttggtggtgtttgaagatgggggatgggggttaaagcaaagmagtagacccctagccttgggctccagtgcaggcctyagcagtgagcaaggagtagaatgtctccaccccaggtgggtgcataggtgtaagaatgcccagagggcttgggtagggcttaaacagccacagggcaagcctgtgtggaagcatctcctctctggggctccccagtcttttcctctgcagaatgagggcacacaactgttctctgaggtttcttccaactcaggggtgtctggcaggttgtgggggctgctagggtgagggaagggtgggaaggagacttgcatgagtctctttttgaaaaggctggatgtaaatggaatttgggaagtaatcccagcatcatagcagaagttggttggagaccatccagccaaggtcctcaaccttgtgacttgtcctcaaccttggctgcatattaaaaaagatgaatgcaggccaagtgtagtggctcacacttgtaatcccagagctttgggaagctgaggtaggaggattgcttgatgccaggagtccaagaccagcctggacaacakagcaagacccctgtctcyatgaaaataaattaggccaagagcagtgactcatacctgtaatcccagcaccttgggaggccaatgcaggaggatcacttcagccagtcattcaagattgcaagaccctgtctctatacaaaaaaaaaaaaaaaaaattcctggcatggtggtgtgcacccatagtcccagctactcaggaggctgaggcaggaggattgcagtgcctgagccccaccatcttgtttttgattggcaggggtagagccaaggcttcggtgttttgttttttgtttttaccaaaactttctctggagattctaaagtgtaggtagtgttgagggagcctctttgttttccagatgaagaaaccatacctagaggacatagttgtgggaaaaaccagcaaaactgctccagggagccagcatggcggtggtagattccaccccaaggtggcgctcaaggctttctgtgggttttcaatccattgatcagagaacaaacggaccaggccttttgttttacaatttacaaggctgtattctattatatataagcatcgataaaaatatgcttctggccaggtgcagtgactcacacctgtaatcccagaaattttgggaggctgaggcaggaagatcatatggggccaggagttcaagaccagcctcagggagaccgtcttcacaaaaaataaagaaaaaagaaaaccacgttcccgtgggacagtgagatgctacgttggggatctatgtggacatgttgggggagtcgtgttgtaatgggggcaacgctaggytgctgttggtgaatgacgagttagaagtgaccaccagcttctcttccactgcccacaggtgtttgtcagcaaagatgtggccaagcacttggggttccagtcagcagaggaagccttgaggggcttgtatggtcrtgtgaggaaagggtgagccggggaagccaggaaggggctttagaaggtacaggatgagcctgractccaggagtccgccctggagctgggaggatggctggggggacggggtgggctaacacccagctgagtggagccgtcttgcagggctgtgcttgtctgtgcctgggctgaggagggcgccgacgccctgggccctgatggcaaattgctccactcggatgctttcccgccaccccgcgtggtggatacactgggagctggagacaccttcaatgcctccgtcatcttcagcctctcccagggtgagtatggcagcaggaggggaaaaggactgggacctgtccctgccccaaacacctggctgacctagctacttgcccctcctccagggaggrgcgtgcaggaagcactgagattcgggtgccaggtggccggcaagaagtgtggcctgcagggctttgatggcatcgtgtgagagcaggtgccggctcctcacacaccatggagactaccattgcggctgcatcgccttctcccctccatccagcctggcgtccaggttgccctgttcaggggacagatgcaagctgtggggaggactctgcctgtgtcctgtgttccccacagggagaggctctggggggatggctggggsatgcagagcctcagagcaaataaatcttcctcagagccagcttctcctctcaatgtctgaactgctctggctgggcattcctgaggctctgactcttcgatcctccctctttgtgtccattccccaaattaacctctccgcccaggcccagaggaggggctgcctgggctagagcagcgagaagtgccctgggcttgccaccagctctgccctggctggggaggacactcggtgccccacacccagtgaacctgccaaagaaaccgtgagagctcttcggggccctgcgttgtgcagactctattcccacagctcagaagctgggagtccacaccgctgagctgaactgacaggccagtggggggcaggggtgcgcctcctctgccctgcccaccagcctgtgatttgatggggtcttcattgtccagaaatacctcctcccgctgactgccccagagcctgaaagtctcacccttggagcccaccttggaattaagggcgtgcctcagccacaaatgtgacccaggatacagagtgttgctgtcctcagggaggtccgatctggaacacatattggaattggggcyaactccaatatagggtgggtaaggccttataatgtaaagagcatataatgtaaagggctttagagtgagacagacctggattmaaatctgccatttaattagctgcatatcaccttagggtacagcacttaacgcaatctgcctcaatttcttcatctgtcaaatggaaccaattctgcttggctacagaattattgtgaggataaaatcatatataaaatgcccagcatgatgcctgatgtgtacaaggctctcaaaaagttctagtgatgattaatattactggggatggggtcacctgccctgagctgcaggagagcatggggtgtctgaacaccaggtgagggggaaccggtgagggtttggggcccagggatagactgagctttcctcactgggtcctctgcagccggccatggctagcaccatgcgctctgctgccggagcaccgtgaggcccagaaacactgggcaggcggcatccctgtcctttcggtccccaaccccgttcctctgagagggtctgggcaggctggacgggtagagaggtggccggggggatgaattcattcagttctttattggtaatctgccccttaacttagggtctccctgagctgcayagaaagacctgatacctactgggaccagrcagggggcacagagatggtccttgtcccagcgtacatttcccctgcccacttcagggcttatgttctggcactgagacttcgtggggtacctgtatcttcaagatctagatctcatcattctccacttgaacaatgtgcacctcaaagtcattttgggtgttcttagactccagtgtttcccctggaagttccttggcctcctctccattctccctggcctctgcctggcccccagcttcccctctgggcccrggggcatctccttyagcctctgcctggcccycagcttcccctctgggcccaggggcatctccttyagcctctgcctggccctcagcttcccctctgggccctggaacatctccatcagcctctgcctggcccccaggctcctggacaggatccaaagactcccttctggcctctacctggccctttgcttcttctctgggaccaggggcttcctgtgtttcttgtcttaatgggcttttagctaatagggactgccttccaacagcttgtggctcctgaggagatggagcaaggggctctccgggctccacgtgcctgagggctactcccgggaagttgatgagctcagcaggggtcatgagcccatccccattcaggtcctgcgtctcgagcactttgtccactatcaatatcacctgtggaagcagagtcactgtggggtctccagggacagagatgttcccaggagttctgaccctccctaacacacccttgcatccctgccgtgcaagctctgagccctccttttacagaggactcaccaaaagagttatgatgagaaagaccaaagccccaaagtgctgggtctcctttatgcggggatctccatccagcagagcttaccgggttggtggtaggagagttggcagctccaggggccagagcagctgtcaacatggacagcagctccaggccatccagctgtccactctggtcatagtcatggagggcaaagaggtagaggagaactaaagagaagagaagctggattagaagaggtgccgggggaggtggagaaggcaggagtcaatggggcagccgaggtcagtcccagatctggctgcccagagcctcccgtccctggccccatcagcccagcccctcaccctgctcccggctcagatgctccagttgcacttctgtccttcctagtccctttaggtagctctgcagaagtctgtcagaaaagtggagaatcagcccgggagaggtgagtctgcagccctgggcctggtcttctccctgaaagcacccccggcccaccctactcacccgagctgctcctggcctggctggaaggggttgggcaggagctgatgctgcacttcagagtctggcctggaggaggaaggggaggaccagccttgcagagagcctccctcagggcccagcctgccaaccttctgcctccaatctcctggcagttttctccccagacccaaagggagttgcccccaaaattccaaaaaccctgtagtggggaggctcttctggtctccttggaaccaaatccttaactccctcagactctgtttttgcagctggctaccttagactttaaatgaaaacccaaataaaacaactggttaggtagaggccagatgaggccacacctagtagacacaagttagagatccaagaaaacagcccagtgagtggcaggacaacatgggtcacagacccctctccttccatgctgggagccaagggacaggactctggctgagcctggtggcactgcccagttttatatagacccagtttgctccatgacataaaattgacctatactttttccaggacagggtgtatctgttggttctggggtttcaagctgctcaggatctcgttgtcagtctttcaagctccaaatgtgctcccacttctggactgggttaactgtttgcccaagtcaatccagacctgtgatgccagagagctggcaggagttgcagcgacttttgtcacagctaccagcccctgtggctgttcctgtggctgtttccccttctacccagcatacccattgcacagtatttataaataaaaccttcagaaaggtattcagataacatagaaatgacatgctaatgatctctacttctttggtgttgccaccataaggtctttttttttttctgagatagagtctcgctctgtcacccaggctgagtgcagtggcttgatctcggctcactgcaacttccacctcccgggttcaagcgattctcttgcctcagcctcctgagtagctgggattacaggcatgcaccaccatgcccggctaattgttttttatttctgtagagatggggtttcaccatgttggccaggctggtctcgaactcctgacctcaggtgatctgtccgcctcggcctcccaaagtgctgggattacaggtgtgagccaccacacccagcccacctcaaggtcttgataacaaaactgcaggccaggcacggtggctcatgcctgtaatcccagcactttgagaggccgatgtgggcggatcacaaggtcaagagttcgagaccagcctggccaacatggtgaaaccccacctctactaaaaatacaaaaattagcccagcatggtggcgggcgcctgtagtcccagctactcgggaggctgaggcagaagaattgcttgaacccgggaggcggagctcgcagtgagctgagatcatgccactgcactccagcctgggcgacagagtaagactctgtctcaagaacaaacaaacaaacaaacaattgcagcccccacttctctggcgccacagcttcttccctgttcttcatgatgcactggagctgagttctctgattccaaatgggtccagcaagcatgtactgaatgcccactttgtggcactctgacaggcacaagatgggaggctgatggcagggagatacagagatcggggaacctacaccccagtctcctgcctcccagagggcccaccacacccttggattctctagagactttccctcctcccagcccttggccctgccctcataaccctgttaccttgtgactccatcctttggggcagcctgacccgtggggagcagcagcaggattaacactgtcatcgtcaaaggtaacatccttcctggaactggaacaaggaagagaatcaggggtcgggggaaagaggcgtctgccaccgtgtcacagatgggctgggttagacacaagcgcattttctgcctgcttctacctgcagccccaaagacaggactcctgctcagggaggactcacagacagacagcagggatcccatggaactatgctcaaaataaatgtcactccagctcttgtatataaagcacataaaggcaggcctgctgtggcggaagcagagctgggggcgcatccccaccccacgccccattcccttgctccccactaggtgccaaggtgcccagagaagtacagcgcaagcatatctgacctccttcagcccattcatcttacagatggaaaggagcgcagaaagtttaagaaaaaggccaggtaagaaacgcagggagtcacaaaaagaccaagacttaaacacaggcaaaaagagaaatggactgtttgtgtttattaaaaacccactgaagaacaaatcaaaagaggcgcagacttcttgaaataggtctaaactcaagtacaaactgcaaacacaataaatcagggtcagaccaacagtggccccaggaattgctatttgctaaatgcagttaggaaaattagacccactataaaggaaaaaacaaaaacttcccctaagactgacatggcttaggcccattggcaaaatcaaccacttgagtatatgaaaacagtcaaggatagaatggaccaatcaaacagagcctaaagctttctggtgagtcccagggtatgtacaggtagtgtgagttcctgaggaagcagaagcccaccaaagccaaggcatgagaccccaagcccatctctagaaagaaaaatcgtcagatgcttgatggtctagcagagatcaggaacatccccatctggctgacactgggttttcctagaggaaggttcatagctttcagcagattctccaagcaacccatgaccctaataaggttcagaaccactgccaggatggacttccatttcctaagagatgaggggtagagcaggtaagcacctggctaatgggaagataaacaaaattctgccttttaaagctaccttaagggaaaactagctaaacatggaagtccacaagaagatgaagctacctagagtcacagaacctgtcatttttcttttttttcttttctttttttttgagaaggagtcctgctctgtcacccaagctggagtgcagtggcatgatctcagctcactgcaacctccacctccctggttcaagtgattctcctgcctcagcctcccgagtagctgggattacaggcaactgccgccacacctggctaatttttgtatttttagtagagacggggtttcaccatgttggtcaggctggtcttgaacacctgacctcaggtgatctgcccgcctgggcctcccaaagtgctgggattacaggcgtgaggcactgcacttggcccgtcttcatttttctatgcatacaactggcccaacagataaagtgagtatacataatttgttggtgtctataagccccagtagccaaaaatagatgctgaagccacagctgccctaaaggtattcaccaacatcagctggcaacataaatcctagggttttagtcgttgcacctggaagagaagacaaggtcctgggcccgttcaaggtaggccattggaactgagatctctgtatcaacatgaaaccgtcaaagggtcacagcccagaaaaaggatggactagaaaaacattcagacttccacttctgggagtgtaatagtaaatgtcccaatgaaagtaaccacaaagctggataaaaatagaaagtatcttttcaaaagcactgggttggcaagaaatcctcaacagtacaaatgtgcagtgaaaacagtaatctgggggaaagtgagcttgacattagcttttgccttaggagtatctgccaaaccaaacccaggtgaacttgagctgcctgtcagtgtgcttgtgctgtaaaggagaccagagatgatacctgggcccacctgatatgaagagactaacaggagattccctacgtaaagctgggattccaaacagctacactctgaacatgaacaaaaagtaaatttgtcatgaagaagggcagcaaagaattttgcctttcttgattttggtgctgtgtagaagggagaaaaaaaactctccctgagactctataacaagcctgatctaatgtgggttttttgtttttgttttttctgggatggagtctctctcactctgtcgcccaggctggagttgctgtggcatgatatcagctcactgcaacctccacctcccgggctcaagcgattctcctgcctcagcctcctgagtatctgggactacaggcatgtgccaccatgcccagctaattttttgtatttttactagagacagagtttcgctgtgttggccaagctggtctcgaactcctgatctcaggtgatcctcccgcctcagcctcccaaactgctgggattacaggcatgaaccactgcgcctgccctctaatgtgggtttgaagcctgaattattaatgctacctgtatggtcagaacatctaaagtaggtaatgtattttgaagtgcaacctggttgatggcacccccagatgactggcagaggaaaacacacatctctggagcaactctaatccaggcctcaaagaatttccataggtaaagtttccaggaatatgaactcatagccaaaacgttataaacatacaaagaaataagacactgagtaagagccagcaaaacaatagcagggaaaagtagacttggaaaagctgtgttggaattgttacacacagaatatacagcagatacagttcacattttttttgttttgttttgttttgtttgagagagggtctcgctctgttgcccaggctggagtgccgtggtgcaatctcagctcactgcaatctctgcctcccgagttccagcaattcccctgcctcaccctcctaagtagctgggattacaggcatgtgccaccacgccctgctaatttttgtatttttagtagagatggggtttcaccatgttgatcaggctggtctcaaactcctgacctcatgatctgcccaccttggcctcccaaagtgctgggattacaggcatgagtcaccgcacccggccagttcacatgtt

SEQ ID NO: 94951 - DNA, 67350 bp, Homo sapiens
tcaaatttctaattttgtctgtttactgttttcctaatattatttagctgcctatttgagctctcttgtaggtcactgagcttttcttttcttctttttttcttttttttctgagaatctcactctgttgcccaggctggagtgcagtggtgcaatctcagctcactgcaacctctgccttccaggttcaagtgattctcctgcctcagcctcccaggtagctgggactacaggcatgtgccaccatgcctggctaattttttgttgttgttgtttgtatttttagtagaaacagggtttcactgtgttagccaggctggtgttgatctcctgaccttgtgatacacctgcctcggcctcccaaagtgctgggattacagatgtgagccaccacgcccggcagtcactgagcttttctaagaattatttcaaattctttttcaggatattcatagatcttcatttctttagggttgtttactggtgtttggtcctttggtagtatcatgtttccctgattattcctcttccttgcattattgaaatgcgggcactcattccagtctttatagactggattcagcagggaatgctgctcacatcaccctatcaagactttgggtaggtcatctgtgggctttatgggtggccttgctgctggtgccctcagatagacagggctggtgaccagataggtaggtgggtgtgctaggcatctaggtccacagggtctggcttggagcctgtgttcacaggacaggggcctgcctagtactgagatgggcctggtgcctgggtccatggggacaaaagtggaacatcagtctagcagtctagtctggtgctggggaagacctaaagcctgattcttcagaggccatcatggaggctgggtttgtgggtggtagcttgtaggctaggccctctggggtagttctggtgccagggtctactggggtagacctggaccttgggtttgttggagcaggcctggaacctgggttcactggaacctggggctgtagggaccagcagtcagtggacctaaagcctatatccactggtgccaacctggagactggggctgtagggcccaacctggtgttggagcctggtgcctgaaactatggggactaacatggggaatggagtgggcatagatctaggcgccatggagattagcctagcattggggtgatcttgtagtctcagtgcatgggtatcagcctagagtctagggccatggtagtcagcctggtgccaagtttcactgtggcaggcctggtgctggagtctgcagcaaagctggcacttacctcactctcctttcctcacacggaccataagtctcagctctgtgctacccaggcttgggaaaggattgactctttcctactatcttcaatgtgtcttttcttaattctctgctacatctaggtgctataatttctcatctggattcctcagttcatgtgaaggtgtcttcataaaaggatagtggttcaggccgggcgtggtggctcacgcttgtaatcccagcactttgggaggctgaggcacgtggatcacctgaggccaggagttcaagacaagcttggccaacatgacaaaaccccgtttctactaaaagtacaaaaattggccggcgtggtagcgtgtgcctgtgattccagctactcaagaggctgaggcagagttgcttgaacccaggaggcggaggttgcagtgagccaagattgcgccattgcactccagcctgggcaacaagagcaagactctgtctcaaaaaaaaaaaaggatagtggttcaaatagatgtttctgtgaagggacaagtactgggaagtgctatactgccatctttctgacatcacccttcttccattctagatagcctttttgaaagtaatactatagtttcaacattttaccatgttattaagtgttctcattcattttgagaaatctgaaaaccaagtatatttaactaacaaaacaaacactacattcccccaagttactactgataactattaacagcatgagatattcattctagtatttttttctatggcattttttaagaaaaaaatttaactacattctcaaaagaaataaagagaggaaagaaccgaggaggaaaaaaagaaaggatgggaaggaggaaaaataaggctaacaaggcatttgaactcaataagcttacattaataaaaattatcatgatagaatataatgcaacaataaatgatatacattgtggtataacattttgatatttctttctcatacctagaactataaccaattcagtctaaagcacgtgttgtttcaggggaaagatagctgtgattgggttacaaatgttttcataaaactcataccagggacaagtgaagaaaatcataatatctgagtctggtttatcttcttcccatccccgctttttagagtaaaaaggtattttgtgcttcagagagaaaaccccttaaaaacttattgcattgagtctaggccacaaacaacagattgaaaatagaatacatgatactcaaagctgaaatataaaaaaaaaaaaagtaaaatcacatcacacggtagtgttgaaacattcaagtgtgtaaatacatgtcgacatcctttgttcagaatgaggaaatacttgaagtgtaaaaacttattactaatcattgtttctcaattttgacttaagggctatttgttcagaataaaatatatggaactaaggccaagaatttgtatgtttacctaatgtgacttgtgtttgccaatgtttgagaacctcagtgtttgtcaagaggcctaggaattcataaacataacaaaagtaactggctttaccttaacctaatatgccaactcccaaaattatgccaaacttgctttacttgtcatcatagcacttaataccccccaacattatatatttttgtttcatttttgacacataacaattttacttatttatgggatatggtgatattttaatgttatttagcaaaaccatcacctcatgtatttaccatttctttgtagtgagaacaaccaaaatcttttctagccattttgaaacaatgttgttaaccacagtcatcctactgtgcaatagaccgccagaatttattcctcctaactgtaactttgtacccactgattaatctcttctcagcctctgataaccaccattttatttcccacttctatgagatcaacttctttggattctacacctgcatgagatcatgtgatatttgtctttctgtgcctggcttatttcacttaatgttctccaggtccatctatgttgccacaaatgacaggatttcattccttttaatggctgaatagtattccattgtatgtatataccacattttctttatccgctcatccactgatggacacttaggttgattccatatctcggctcttatgaacagtgctgcaataaacatgagagtgcagatatctctgcaacatactgattttacttccttcagatatatacccaggcgtgggattgtgggatcatatggcagttttgtttttaattttttgaggaacctctatactgttttctataatggctagagtaattcaaattcttttgtttatttattatttttttgagacggagtctcgctgtgtcacccaggctggagtgcagtggtgtgatctcggctcactgcagcctctgcctcccaggtttagctgggactacaggcatgtgctgccatgcctggctaatttttttgtatttttagtagataaggggtttcagcatgtgggccaggatggtcttgacctcctgacctcgggatccgcccacctcagcctcccaaagtgctgggattacaggcgtgagccactgcatctggccagtaatttacattcttaccaacagtgtataagtatttctctccacatatgcatgggcatgttattttttgtctttttgataatagccattctaacaggtatgaggtgatatctcattgtggttttgatttgcatttcccctatgattatttttatttatttttaattttttaaaaatgtatgtatttgtttttgagagtcttgctctgtcaccctggctggaatgcagtggtgtgatcatggctcactgcagcctcgagctcctgggctccagtgatcctcccacctcaggctcctgagtagctaggactataggtgtatgccacattgcccagccaattgtgattttttgtagagacagggttctgccatgttgcccatggctggtcttgaacttctgggctcaagcaatccacctgcttggcctcccaaggtgtgggattacaggtgtgagtcactgtgcctggctgagcattttttcatatatttgttagtcatcatcatgttttcttttgagaaatgtccattcaggccttttgctcatttttaaattggattttttttttttttttttggctattgagttgacttcttcatatactctggatattaaccctttgtcagatatatagtttgcaaatattttctcccattctgcaggctgtcttttcactccgttgattatacatattatgtatttacttatctttcattgtccacctaccccactatatagagtttaacttggatattttcccaaagtgttaaaaagaaagatggaaaatgggagccagaaatagaaagcccactgagtactacagttatcactgagaaagaagaatgaaagttattactgaaaaataaaactgaagaaacctctcagatgggcctggtgcctgggtccatggggacaaaagtggaacatcagtctagcagtctagtctggtgctggggaagacctaaagcctgattcttcagaggccatcatggaggctgggtttgtgggtggtagcctgtaggctaggccctctggggtagttctggtgccagggtctactggggtagacctggaccttgggtttgttggagcaggcctggaacctgggttcactggaacctggggctgtagggaccagcagtcagtggacctaaagcctatatccactggtgccaacctggagactggggctgtagggcccaacctggtgttggagcctggtgcctgaaactatggggaccaacatggggaatggagtgggcatagatctaggcgccatggagattagcctagcattggggtgatcttggagtctcagtgaaatggctcagtgatcttggagtctcattttataacaaactagaattaaatacagtacttctaataatgacttcttccaattagtccaaactgggctcccacttattccctatcatacacatctccgtatcgtaaaactatcctccctgttcggcgcgttggcacattctgttcctccgactagaatattccctgtacttattcaaatcatacctatgaccactgcagaactccaggaacatgaccatcccatctaaacccctgcgttcagagacttgaccaaactctagcaagctttagcagcataaggccctgtgcccagggcgactgcctcagaaagcttaactacgtgatgtaaccagcacacaactgatgataggtctctgacatccctttcttagaacgtttactaaagggcttgcaattgtaaagacttatttcttgccactcagaagttctctctcaaggaccagagagtcattcctttgaaatgtaatcgagaaggataaaatcctccgtaggaggatagaatcctgcggtaactgttaaaacgcgcgcacacacaaacacacagctggcctaatcacatttacactaacaactctgtaggttcactttctctactgagcgcccgcatatcccctttctccttttaaaacgtccctttaaaaatgcccagatgatctctgcacgaatcgaaatagagctcagctctttcctgtcagtagttaactgaatgttttcaccgctttaacgtccagctgcgcttatctttgacatcgactacctaaggtctacctttagtcccacgactctgacaaaatgatctcaatattggtgtaaaatcacctcccctttcaagggtcttccaaagcacttcctgtctgcggcatacaaaatgtattggcacggaattttaagcttactgagctttataaacacgtcacattcacacattcaagacacacactggatattcggataaaaacaaacaaacaaaaaactggctaaatacccattcccctcaataacttggataagatacctaaaaaaggtcgaccttcggtacctttctgtcttctcccctctcgctatttgcctacactggcttcctcacctccactttttctcacgtttatctgagcgaaaacaagcacggttcggcagcctcctttcccagccctacctttgtgctgcaaaagcgaaaattcaaaagccaagtacaataggagaccgcccaccctggctccctcgtgacacgagggagcgcgaagcggagggcgcctcgcggcaggagcgggatttccggggtcacgggaaccggcaggggaacgggataaagttcctggagaaaggaaagsagagcgtgggatagtaaaagagaagacgcggagaagaggagaggacctacaagaacggaggacaggggcgcacgatggtcccggggggagcggaaacaaaggcacgcaaaacggaaaagcgtgtgtaggggagcggaaaaggaagtcaccaccgtggcctgcgacggtaagtggtcgtaagggttggtcttagcgcttcagtttagtgttgtcagtgggagaatcctaaaatgtcgccgtggaatggactgtaccgctcgcttctccaaacgtgtcccagacggcgagcctccccggctccgcggcttgtcccttgcaagcgccgcgcaggcctgccccgcgctggacgtggagacgcggtgccgagcgccacgggccggctgtgcgcsggcsggggaaagagggcgaggggaagagatgaatcggtcttcccagagcgcgccgcgaggtcgcgagattacactttaaaaagcatgaggaggcttgctttctacatgctgatttaatttcggaatacattcgaggccctgtgctragttaggtaatgttccctataattgtcttttatgtataagttgtcttgcctaactaaaacttttcttacttgtatcgtgcagccaacttttcaagaacgaaagatgagcaactcctttctggtagaggttctttcattggagaatttttgagctacaataatccttttaacgctgcgcacacatacagkgattacacgtgtaggggattaaaaacacagttaagtttaggttgaaggtgctgttaaggacttcaggcaacattaaatcaacactcagttctttgctctgttccacatctgggctcctgtatagcagttgttgctctaggtgctagaggtatgcagaggaactggacaagggcaaggaaaacaaagggctccttctttagaagagctagcattctcttggaacagacaagcttgtggtgagaagtatatttgtgaaatctacgaggggagggagcagcgcagtaatagaacgggcgatcctttcttgattttttattgggttctggcctgaaaggcgactgtataatcagctgggattcctgcaatgattaacattccaggaagggaagccagcctgtgaagaagcatggcattgaaacagggtgagttgtgaggattataaacagggtagttggagagttgatttgtggccagattcttaagcccctgtttagtcttaagaatattatctttaggcaytgcaaatgccctcttgcagctaagactaatgggaagaactggttaaaaaactaattacagcaaagagtgagtgagagtggtgatgagagatacagatgttctgagagcagacaataaggggactttatgtagtcctatgttagaggagatgatttgaagttactctgaggaagacaaaaatgtaacaggtagatcgcatatgcgaaagcttgagatggcgaaaaaatcaaaaggatttcaggaactgaaagttgtgcattttggctgtgtgagggagagagttgtggrtggcatgtaatgaaccttgaaaggtagtttatgttatgacagcctacaaccgaatcagaacttttacaaacaggcgatatacagacagtctgaaatcaaatgcttctgatttctattacgtgctctaggctaattgttttctttttaagtatgagtttgcgttagtcttctggatttagtgattacagtataaggtgaaacaggtaaaggcttttagagaacatctcacttatttcctgtgcactaaagggaaacagatcacctttgcagaacttgaaaaaaatgggaagtgcgacctttgatctcagatggactttctttcctcttttcagtggcttggtagtgagcttgttcagctccactgaatcttctttgtggtggggctgcaagacatcctgcatggcargttttaaacataagttttaccccgaagaaagcttataaaattgtaaatgcttcagaaccttttcatcttcctgtgattctggaagaaatccaaaaaaaaccaatcgtttaactacatacttctacagaacctgaatcttaagctttgttcactttatactattagatactatagtaggttaataatgactaacaccttgtcatctcatcactgagcttttgtctaagatagtctctgaatttagaactgggacgaaagtgtacataataggctattataaaatttttagaattggatttctaaacttggggtcagtgaatctagcaggcttaagcagtgttctcaggtttttctggcacagacaaggaatataagaggaggagagaaaaggagagacagtagtgggagggaatagaatgagagaagatagaaaatayggaattaatagagaaaggatacatgaagtattacaagattttcttggaaaaattggcatttcagtgatggatcaaagatgtctaatgaggcaaaatactactattacttaaatatttaatgttttaaagatttgaggataaaaggatatagatctgatggcgttcatactaattgctgtagtgttgatgttggagagaggggtaatgtatcaagacagagcagacagaccctttacaatgagagcagaagatatgttgtttactgattctactttcccacaaaatgctaatgcttttataagtccctcctccttattttctagattaactccttgtttcttcctctaaacagaggattatggcagacaggcmaaaaaaaaaaaacttttaaagcaactatctaagtccttaccaagtttctttagcacttttattctaaagttatcaaggtggaaattggggcctctgccccacatgtatctgcttcattgggttgtatcttcatacctgattaacggcatattctaggcaaaagcaagaccctaggcatgctatgtttggctctgaatatgtaggcctcccaggtttattagctgaactggtacatgaccttgacagcttattttccctagactagaagcattcctaaggaaccctgagctctaggctatttggccttcttagaatgggacacttcccaaattgaaggcagccctaggttgcagagaggagagaggagggagaaagggagagagggagaaagcaagttcccttcatcctcagtaaatagaatgaagaagggaaggacacagtgagtcaagtcttatctcaatacctactgggtaaattgcctctcattctgagaaagttatagaaaatgcatcaggttatccttaactcacacctaacagtcttgtgagaaaatctgttcaaatagttaaagtaggaagaatactactaactagacccttatacgatatgtattatatgtagatatgtagaatgactttgtattgtctattaacctcatttcttaaaaagtgtcaatatttttattagtgatccaatagagattatgttgcatataaacccattttgtaaatatgaataaaaccagacaaggagctcttgccttccctttctgaagaggagcagagattcctcagctaggagtgatggagaaggtgtggctctttggcaagctgaccagaggccagtgaaagattatttatttatttggctgactatgataccctcacttgtagccacacccccygggtttgcattttttaaaaaccccaacagtgaaatagttcttttttctttttctttctttctttttttttttttttgagacagagtctctcgctctgtcaccatggctggagtgcagtggtgtgatcttggctcactgcaatttccgtttcctgggttcaagttattctcctgcctcagcctcctgagtaactaggattagaggtgtgtgccactacacctggctgatttttgtatttttagtagagatggggtttcgccatgttggccaggctggtctcaaactcctgacctcaggcgatctgcccactttggtctcctagagtgctgggattacaggcataagccaccgtacctggcctgaaatagttctttttttcttattttgtaaatatagatattatctttagtttagaaaatgatgactaggtaccataatacctatatagtaataaccacattatgtgtcatttagttccacaaaaatttaatgtaaaattctgcgttaagagctgtaagatgcagtccctgtcctgatcacccctaaaatgctacagcttatctcgtatgtacctttctgttatgttttctggttgtgcatgattttttaagaaatatcattacctttaataaggacctttgcttagctgccagacttgtcaacaaagaaatttcagatatctataggctgtaattattgttagtggctactgatgcaatatgtaaagtagaggtctgaagaaactagttttgcaactggcagtttaggagattggaaggaattcctgaacaggacatctgtcaatatttggaatgatactcttctatttaaaaagaaaaagtttcctgagaagtaaatgtagcacacatacctaragagtaaaatgtataagatgaatttaaagaacaacaacaaaagaaataactgtggatgcattatctaggttaagaaatagaacatacccgtattttgaaacttaactttttcagtactggttaggtgactcaactggtatttttcttcattcatcacatctgtgtttcttttctttctggccaaatgcaatgtaacataaatttcaactcagtgaacaaaagtcatttgttatagaagtaatatatagctgtgaaacactagtattgcactgtttcataaccataaaaattctggttacacatatgtaggataattctggttttatatatatgtatgtgagtatatacatttgatatttactttactccctagcagagctggtatgttgcttgattttggttgtgcttctgcttagaattttaaaaattagaaagaagggcaataaagcatcataattccatgcactgatttaatgttattggattcatttatacctaaagaaaatccttagactacatgataaaggtttactggtggaaaaaaaaaagatatccttttatgaagttaagattatacattaaatttaatggaactctctagtagagctcaataaaaggagatactttgctctattttcaattagatawttgagttatttttgctttatgtgtgcatattttgtttctctgacaaaactgaaaacttttaaagatgctttctctctgaaatcgctaacaatggggtgatcactaataggaattcagtaaatagccattgaattgctacagaactacctcttaccaaatgctcttaacatatgcatatatgtctatacacttggatcccatttcttggccagaaaagtctacatataaatgtaaatttaatggtccatatgccaagaaactaataactgtttttatttctgagaatgcagctaaatatctacttacctactttaaataatccagtgaagaataccatcctgtttgaaaatatttgtcttaattgctaatccagttactatgtttttaaaaatttgcctttaaaaaagtaaagaaagcttcagaattcattttgaatgatatattttggtatatttcctatttttctcatagactttgaccactgaacttcggtctaagggtagtgaaaggggaggtgaaacagaaagaataatggttgagtatgggagggttatgattatgaatggagattacaaacataaatacatcctgtcatgagaatataggtgttgttgatgtgaacagtcaaactctgtaaaatattttaagagatttattctgagccaaatatgagtgaccatggcctgtgacacagccctcaggtcctgagaacatgtgcccaaggtggctggggtacaacttggttttacatattttaggaaggcatgaaacatcaatcaaatacatttaagaaatacattggtttggttcagaaaggagggacaacttaaagcgggggtgcttccagggtataggtaaatttaaactttctggttgacatttggttgagtttgtctaaagacctgggatccatagaaaggaatgttcaggttaaagataaaggattgtggagaccaagtttttttgtgcagaggaatctctcagcagacttcagagagagcaggttgtaaaatgtttcttatcagacctagaagggtgcttggctcttagttgattatctcctggatctggaaagaaaggaaggaaaacaaagcgggaaggggaggctctgtagaatgtggatttttcccacaagaaacttcgcagggcaatttcagggtatggcaaggaaatgtatttaggaattaaatattttcttcttgtcttagaatgttatgccagagtcagattgaaaagtaagtcacaatatatagggttaaataaaacccatctgatgagaatttatggtttgtagggcatgactccccagaccccttaggtgggaatttgggcaagattaaaaaatcagagcttagtcctcagtgtggttaaccaatttgtttcaagccccattgcttggcatttctcaataaagtctgaaatttttagtttaagttgcttccactagctaagagattttgaggcaacttgatatttacatttgagtgataacttagaaagtgtctaaaatccttggtgtttttttcataaccacttcacactttgtaattggtaacattttatttgtaaaacttttccccgcttccattttccgtagacttgaattttctatgcttatcactttatttctccttcagggtaaaatatttaaaaatacagttctgtgtgccttagagcaagaaaactctcaaccacagaatttgtccttgcccaggaaagttttgctttccagttaaagagagagtttatttgaccaggatagctcattttccaataatggtagataactaatggtaataatttcagaaatacttcctttccatagacagaacttttacttccctttgggaaagcagggaaataggtctttgaaccagactgcagttttgggtaatggagctatataagggaaagagataagttaaatatggggaataatattcagtgaatgaaaataatatttgcaggaacattatttcaagtgaatcatttgtttaaaattaaataatctattatttaagtatatggcagtaatttttggcatttaaaaattttatttagtttcacagtatcctctcattcttctacatgcccggtaattttatgtagtactggtaaagtacctattattgcactaaattaggtggtgagaacatctgtgatataaactttcattctgcctttattgtgtcactaaacatttccatgttctaattagattcttttattttgaagtttattttaaaaatcttgcagggtaccttgaattaactgaaaatatcctagaatgttgcaaaatcatgtttgatcattgttccctctagctttctagttcttcaggaggccttagataccttaaaatctgttaataccrtagaatcagttaataccgtatcattttctaatttgacagaacaggtgatgggatggaakgatgtctcataagttatactgtatgagttttggaaaaggagtatggaattgccaatagatgaagacattaaagtattgaaaatactaaatatttagatattttgcaacttgtaacatttgaccactttccttattagttgcttattagttttgtatatcacattgacccaaaccttattaatcacaattcattaagtaggtcacccagtgctttcattattctttattcggtaaccatagctgctggcaactggtgacttttttggtgggagggagggaggatacaaagaaagacgataacagatttgaaattaagggaaagaataaagttatgacagttaaaagcaggtcctatcaaagatttatgatggcaagttagaacatcttttttttcttggaaaaataacatcaagtttttattcttagataccattttttaagatgacaagcaccccgctactttttttgtcacactctaaaatataatgcattaggtcacaatttatctgagttacacttcagtctccttgaggagatttaagaaaggtcttggtatcttcaatattgtagttataagccaccttagttggtaaagttttgaaatactgttctcaagtttttgaaatatatgtgtttgaggggattacatcccactgtgtgttcaggtaagtattcattggaaacactttggtaaaaatgtcacttgaaggccatgtgacttaaagtggaaaccagatattgtattgtaacctttatatgttctctgtcagtttctgataccattttataactcacatattagatatatttttaaagctataaaacaagtttgtggcattccttttggctgcgtgatgagttattttttttacttgcctacattctccctcattaactattaagtaagtaccttttatgtattaagtactgtagccactagtgacacaaagtatgtacctcagaatactctcaggaagcatccttccaactgagaaaaacaaatgaaaaattgaaatgatttgaggaatgtgttaaaatggaacattattgcagtatactgagctgggataaataaagggagtgattatctttacttggggaatcacttttaggtggaaatatagaaattcagtttttaaaaatgattggggatttaccaggttaatgagggaggaaagaacaatataggggagaagcaataatataaaatagcatggtaaatttgtgggactctggttatttggtgttctgtattgattgtgtagagatatcagacgagaagagattcaggatttaggtaagaatttaaaaaaagctttggacttgatccttttggtagacagctactgagaaaccttaaatttgaaatgtcctgattggattataatcatatccacattactctaaagaacagtatgctactaattggtgactgttgtattaattcagattatatgtaatgaagtttgaactgtattagtaataggagagggaaagatcagaaggaagtaaccattttggagggccattgcatacggacctccaaatagtggtrgagaaggagactgggttgatttagaggttttctggcatagattacagggttgatgatacaatgaatagttcagggaaagaaggagtaatgggttttacgtgaagtatgagttcaggattaaataatgattttgagaagcctatgataaatctagaaatgaggggtaagggattgcatttctgttaggcaatactaaggagtacaggcataaggtctgaattagagatagaaatgtgwgattcatgtcttgtaggttttaggaaagttgtgagcagaagaataaaagatctctaacaaattaataaaaaggcaaataaatagaaataatgggcaaaaagcttgcacaggaacttcacaaaagatgatatgcaaatgaccaataagcataagaaaatggggtttatcttcgttagacattatagaaacacaaaatgaaaccacagtaagataccatccactagaatgcctaaaatagaaaaaacaaagaagaagtgatacttgtggagcaactggagctttcactgcctgtgggaatatacatttgtacagctattttaaaaaactgacagtatattctaaggttgagcaaatgcatacattataactggtggtatactggtaaactgtgtgtgtgtgtgtgtgtgtgtgtgtgtgtgtgtgtgtgtgtgtgtgtaagagaaagagagtatgattgatatgtcatgtagtcccaccatggtcaatttcaagctactgatagtttaaagaaccaacttgcaaaataaatgtttaatcatcagtgtagactgggccgcagcacaccaacccaacaatttcattcctagatacatacccatcagacatgggtatgtattgatcaaaagacacatgctaaaatgttcataactactctatagtcatgccaaaagctagaaataatccaaatgtctattaagattagaatagataaattgtggtatatttatataatatgtgaaaggaaaatagatctcaggaccccaaaatcactaagccaagggaaaagtcaagctgggaactacatcaggtaaacctaactcctatattattcctaaataagatggctgaaaagataaaagagctacatacctccttcccagtttgtccataaggaaattccttgtgatccttaagatctttaccctaaaactaacttctgttgaatttcactctgacatttaaacckatagcttatgttcataggtgctggacagaaagccatccctctgggctgggcgtggtggctcacacctgtaatcccagcactttgggaagccaaggtgggtggatcacttgaggccaggaacttgagatcagcctgtccaaaatggcgaaactctgtctttactaaaaatagaaaaattagcttggcatgttggcatatacctatagtcccagctactcgggaggcttaggcacgagaatcacttcaacctgggaggctgaggtttcagtgagtggagatagtgccactgcattacagcctgggcaacaaaggagagactgtctcaaacacccctcccctgcccccaaaaagcaagtcatccctctgctaacttcagacaaatgcacatctgattacttcctctgccctattgtttatgtaaaaatgcagattcactgagccagactaaattgtgtattcagtagaaggctgatgaggtactcaaaagaatgcaaccttttgtctattatctacctgtgacccggaagaactcccctacatccacctcctgcctccccaccaccctcccccacagaagtttagagttgtcctgccttacctcagtcagaccagtgaacatcttacacatattgattgatgtcccatgtctccccaaaatgtgtaaaagtcaagtcataccccgaccaccttgggcacatgtggtcagaacctcctgagtctgtgtcttgagtgcattcctaaccttggcaaaataaatattctgaattggttgagacctgtctcagatattttgggttcacaaatagaatacagccatgagaataatggactatttagactctgattacacataacactaatggatgctaataaaattgaaaccagacacacaatatatagtatttatataaagttcaaaagtaatctcgtgtattagaagtcaagaagttacttttacttgaagggttttgactgaaaggtgacacagaggatcttgtgagcttcaggttatgttctgtttcttgatttgggttccatttactagaatgtattcaccttgtgaaaattcattgaactgtaacttatattttatatacttttttgcatataatcttatatcaacaaggatgtttacatagggcaagaaaagcttatgggcagagatgagattactcaggaggtaaaaattaagaggagaaaagtgacagaaccttggggaacagaaaaaccacacacacattcctatttccctccccatttttcttaggaccctttccagctttttgcctgaaagctttgcagaaggtaagaataatgctaagaataaaacttctgttagagagtgggattgctcttgcagcatttctgcatagaggctgtttccaaggggacacttggactatatttattcttagattttaaaaaagttaagagttggagaatgaagaagcatgtgatgcaaaagactacctagaggcaggagatggtgcaaaatacagagcagcattttttctaagctttcctattgtattggagcacagtaaatatactgtaattatgccattgtctcttagtgatatatactgaaatgatatgctttgtgaattatttggtttgagaaggagggaaaaatgaaaggaattccatactgatcatttcctgaaagagtgcttttagaaatggggaagtggccagatgggacagctcacgcctataatcccagcactttgggaggctgagrtgggtggatcatttgaggtcaggagttcgagaccagcctggttaacatggtgaaaccctgcctctactaaaaatataaaaattagccaggcrtggtcatgggtgcctgtagtctcaggtaattgggaagctgagataggagaatcgtttgaagctgggaggcagaggtttcagtgagctgagagcttcactgtactccagcctgggcaacagggtgaaattgtctcaaaaaaaaaaaaaaaagaaatggggaagtattcccaactcaacagaagggtccattactacagcctattaacacataatattagaaaagtgagtgcctattcatctatactaccgcatacttatttctgttttccagaaatggcgaaaagtcttttgaagacagcctctctgtctggaaggacaaaattgctacatcaaacaggattgtcactttatagtacatcccatggattttatgaggaagaagtgaaaaaaacacttcagcagtttcctggtggatccattgaccttcagaaggaagacaatggcattggcattcttactctgaacaatccaagtagaatgaatgccttttcaggtattagggatctttttattcctaaagaatgacactaaatctaaactgttatcacaagtttttttatccttgctgtggtgacagaatgttttaaagtccttgtactcttggtagaacatgagaaaaataacaaaaacaacaactctgtaatatgaactagaaacactttaagtaacttttaatgattatggatatttgaatgttttcagaaaactcattaatacagatattgataaaaaggaaatctaaattaatcttgattatattttccaccgaaattcattaactgtttaataacttcatttgttttcagctaatgctactaggaaacaaggagaaagaggtttcaaagagttcctgaaactaaagagaaaagcctgttaatgaaaagaattatttagcgtaatttttttctgtgaattgaaataaaatcattgttagtttttaaccttttaattccatggttacagaagaaacacggcacttgtccagctgtggaatcttccctaactcttagatactggtgaatgccttctattttctagtcaacactcttagcatataagaattttatatttaagagaactgaagatgcaggacatgtggtactttgtaatttttgctgaagctcaaatttgaactacgctaccactgtgttatgcaggagctaatgagtagccttgttgaatactcaccactcctattttcaagttgattttagtaatctctccttttcagttatgcacttcatgattataatctttagtagcatttgaaatttgaggctcagaaaatctcacaaaattttcatgtatctactttatatacagttgtactatagacataattcaatagtctgtaaaccctttgtaaattaccagtggtgagtctttaaacccaagatgacttttctctccacttaccagaattcagagagatttctctataccagtgctgaccaatgaaaacataatgtaagaaacaaaggtgagccacatgtgcaattttaaatattctagtaaccatagtttaaaaaaatttaaaaaaggtaaaattaagtttaacaattcacttataactcagtatatccaaaatatttttttcaatatgtcactaatataaacaattatgaggtatttttctttttattttcatactaagtctctgaaatctggtatttattttatacttatgacacatcttaatttggactagccacgtatcaagtgctcagtacacacaggtgactagtgactaccttattagactttgtagttctatatgttcagttggtttagggaataaaaaccaatttaatattagtccaggaaaaatagaaattgaaaggtaaaatttctctagaaggttaaattggatcaatagtgatgatttatttctgaaaagttacaaataattttttattcaattagaaacaaatattattttgatgcataatatataaaactaatgctttgatttgggtaatggtatttggtggagttggattgggagaggatgaatgagcactcaaggcccttgtttaaaaatcattcagttagatactctttaaggtctcttccatcttttgaggtttactttgcaaacttgaaaagattagtttaacagtaactactggtatggatttttcttattctcgtggccagcatttcagcatcataggaaaggtttaaaaaaaaaycagcaccataggaaaggttttaaaacaaaggccaacattgttttttttatttatttatttttattttatttattttactttttttgagatggagtctcactctgtcgcctaggctggagtgcagtggcgcgatctcagctcactgcaagctctgcctcccgggtttacgccattctcctgcctcagcctccggactagctgggactacaggcgcctgccaccacgcccggctagtttttttatatttttagtagagaaggggtttcaccgtgttggccaggatggtctcgatctcctgacctcgtgatctgcccgccttggcctcccaaagtgctgggattacaggcgtgagccactgcacccggcctgttttttagaaccttaaatattatgagtgattaaaggcccatattaacctatacagatttattcttatactaaaaatatgggtttcttctttcccttactagactatatatcacttgaaagcaaaagaacgatatttctaaaggatctaggacatccttggaaagggttacagttttaagtgcagtcatttgttgctttgtgatggggatgcattctaagaaatatgttaggtgactctgtcattgtgtgaacattgtagggtgtacttacacctagatagtataacctattacacacctataccatatgatacagcttgctgctcctaggctacaaacctattcagtgtgttacttcctgaatactataggcaactgtaatacaaacatgtgaataattcattgtactacattacaatggctatgatggttactaggtgataggaattttttagctctattttaatcttgggaccaccatggtatatgtgatacattgttggtgcatgactgtaggtcataattagccataagaaagaatagctgcattagtcatttgtgagttagtakcattaacataacatttactgtggagccacctcactcctggctacttcagaaaatggcaaagaaaataatagttcttgacattgtgggatttatattccaaagaagtgtacataatttaatggggccatcttttggaaccttgtggtacaaattttttgccagttttaacccgctgttatgatctttatacattggcttctaaagcattgcctaggcagaggaaattaaaactagtcatgttgaaaaccatgaactttgtgaacttagaagatcaccaaagataagcatatctaaaagttattgattagatcttaaaatgccagtcccagctgtttctgtgttaaatttgtctattataaagaagctccaatagaattttggagtaatatcaaggtaacaatctataaatcatagaatcaatggttggtaggcctgtgaagaacttccatcgtatgcctcaagcccctcagaggacagtttgttaaccatggaacaagatggtatttattactcatttcctcaattaacatcctattatactaattctgatgtcagtagtataggaattgtgttttgttctgtataccatatgtccaatatatcataagatctcatagtcatgttatacccataaagctttattgactgagacatgtattgctgagaagtcaggtctatgtcttatctttaccctaagaaataattttttcttattaccatatcgttttcttattcttaggacagcatagtatattcttattcttctacataatcatatatttatgtgatttcttaagataaatggagagatagacacataataaatttacatttacaatgcagggcctgccatgtgtacctcttctgtatactccatagtgccagtgcagtaggcatttgatagacactcagtaaatatttataaaatataggacctaagagtatgcttgacacttgtgatttrtaaattatttctgtttttccagtcaccttcatatatttgtgatttcccacttccatctctggcaggtgttatgatgctacaacttctggaaaaagtaattgaattggaaaattggacagaggggaaaggcctcattgtccgtggggcaaaaaatactttctcttcaggatctgatctgaatgctgtgaaatcactaggaactccagaggcaagtgttatatgaattatgcatttgattctacatgtttattagacatgtatggcagatacatttatattttactaatggttatgatgactttaataactttcaaaggattatggggattttttggtttgttttgtttttggtaggattataggaggaacaatataacaagcaaatgattctgaggttttactagtagtatatctgcgaacggctcttgttaaaagctttgaaattactgttatttctagtttagcagaacactctcagttgtgttagatattttggagggtgggattctctctctctcttgctgttaatgttactccagccccctcaaatgccccactttgtctgtttatttttaagtgtattgatttcttttttaaaaaatatttttaattttagaataattttaaatttacaggaaagttgcagatggaatacagagttcctgtacaccctgcatccagtttccccttttattaacatcttatattcctatggtacatagatttattgctactaatgaaccgatgtgatagtctgttctcacactgctctaaagatctacctgagactgggtagtttatgaagaaaagacatttcattgacttacagttctgcacgctatacaggaagcatggctgggaggcctcaggaaacttaggattatggtggaaggcaaaggtgaagcaagcacatcttaccatggtggagccagagggcggggagaagtaccacacactttcaaacaacaaggtctcatgagaactcattcactatcacaagaacagcaagggggaaatccaccccgatgatccagtcaccttccaccaggcccctccttcatccttcaacactgggaattacaatttgacatgagatttggttgggggacacagagtcaaaccatatcaacccacattgttactttactattaatgaaactctactgtatgatttcatttatatatggaatctaaaatagtgaaacctattttagcatggtggctcacacctataatatgagtgctttggtaggctgagatgggaggattgcttgaggccaggagttcaacactagcctggacaacatagccagtccttgtctctaccaaaaaattaaaaaaattagccgggtgtgctggcacatgcctgtagtcccagctacttgggaggctgaggcgggaaggttgcttgagtccaggagcttaaggcttcattgagccatgttggtgtcactgcactccagcctgggtgacagagtgagaccctgtctcaaaaaaaatagtgaaactcagagaagccaggactggaatggtgattatcaggggcttggtggtggggatgggcagggattggtcttgagtgttcttgttacacatacacacaaagttaataataataataataaaaggggtgggaggaaactttgggaggtagtgtatatgtcagggccttgagagtggtgatggtttaatgggtgtatacttatgtacaaactcatcaagttgtatacattgaatatgtacagctttttacctgttagtcataattcaacaaagtgttaaaaagaaaaaagaaactccacacttcattcatatttcagtactttttctactggtatcccttttctgcttcaagatcaaatccgggacaccacagtacctttagctgtcattgtttcagattcctcttacctatgatagtttctcagacttaccttgtttttcatgaccttggcagttttgaagagtgctggttagatattctgtagaatatccttcaaatggaatttgtctggtgtttttctcatattaggctggggttatgggattctgagagaaagaccagaggtaagcttctattttcatcacatcacatcaagggaatatgctgtcaaggtgacttatcactaatgatgttaaccttggtcacctggcgaagatagtgtttgcctggttactctattttaaatttactttccgtactccactccttggaagcaagttactaagtttagtctacactcaagggggaagggaaaataaattccatctcctggaagggggacatataagtccattattcttatgtaagggggatttgggtcttcttccccatttactcacatacttatttattcagttatttatatcaatatgcactcatggatatttattttatatgcattattcattttgttgctcaaattgttccagctttggccattggaagcccaaagaccaaagacccaaagtcctgtcttcttttgtcactcccctatccttttgttttttgagtactcccttactttctagtattattagatactccaagttaatcttgtattttccctgctccaattatataatcggtgatttcttcaaggagtcctggttatggaaaatggtagaggatggtgttagaaactaagatctaggtgttaggtgtttctgtttttcaagtacattgatatagcacattcctgggttagtcgagcctacctgtgactaaaataggataaagaaaagctcttaatgcagagtgagaagtcttgggtttagacataggcctgccactcaactaaatgagaaagttgctcaatttcctcttagcctcagctccatgggatatataaaatctatctcacaggcgtttttgaggattgagttagctaatgtattctaaagtgctttgtaaactagagggagctactgtaacattttaaataggtaatataaattagtaatattaagatgatagatcaaattcaatatcatcacttttcctttagcagtcatatgaagtcagtacttttgttattgtttatttgttttgctttttaaagattagggtgcagtagtgggaagggctgaagaaaatgaaggacaggaagattagcaatgaacaaaagtggtcatcattaaaaatcagcaagaatttgaattcctttaagtggaagctctttagcatctcatgataagttttacatgagctatgtatataaatcacctagttctggcacatagtaaagttcaagaagtagtaacaaatttaaaaatatgcttttgaattaccctgacagagtagaaatactatcatcttcctttatcaatcctccaaggaacttgttttcatgaattcagtgctccttccccctctaccacatcttctaggaaaaacaaagaaaagaaaagaaaggaaggaaatgaaattagaaagggaaaaaagtaaagttttcatgatattccataagtctcatgccactgtatgtagtatatgattattatttgcacatgtgaggaagaatcttttggttaatcagaacactggctttgataaacttggatttgaaagctggtttcaatactttctggctaagtgattgggcaagtcacttaatctttctaaatcttattttcctagtctataaatgaggagtatagtggatatttcgctgagctattgtgaggattcaagataatatatataaagtgcctactagcaccgtatctgaaaaaggtagctattatttttatttcaaagatcttgagattagtaaacattatcattaatgagatgatgcataatttgtagcaccccactagacttaaatttgtgatgtatctgaacggttatagcactaagctggaaatttgaaaagacggatttttccctccaagatctaataattagctatgtcacctgcaagtcatttgattatacgggttgagtatcccttatccaaaatgcttggaactagaagtatttcagattttacattttttcagattttggaatatttacatatatatatataatgagatatcctgggaatggaacccaactctaaacaaaaaattcacttatatttcatatacaccttaaacacacagcctggaggtaattttatacagtattttcattaattttgtacgcaaaacaaagtttgtgtacatgagatcaggtgtggaattttccacttacagtatcatgtcagcactcaaaaagttttagattttggagcgtttagatttcatattttcatagctcaacctatatatatgtatttttcatctctcaaatggttgtatcactgttcaccttagttcatgaaagacactgttaaagacagaatgatataatagactgttgtgggtttgatataagctggttaggaaaacatctctaaaaagtgagtggttattttactttctaattttcttttagttagaaggttgtttctgtctctttagatcatgtgaccacgattctttttctatatatttagagatggaagtggaaacatgcttattgttttatatatacatcattgawatatatatatatacacacatatatatatagtatatatacatcattggtctggcataagtcatgcaggaaaacatggagagagtttttattccagcttcaaataaggaatcacttagtaaagttcattctttctagtacctacattctccaagtaatctgctcttttcagtgcctgaagtaaatcttggttaacagctgaggagtagtattactgcaagtgttcgtcacttgttgctgtatacatctgtcagtcttatcaaggaaatgtggaatggtgaatctgctttacaatgagtatgcctagaactcagaatcttattttatttaaaacattgatctcgttttattttattgagacagagtcttgctctgtcacccaggctggagtgcagtggcagcgatctcgrctcactgcaacctccgcctcctgggttcaagtgattctcctgcttcagcctcctaagtagctgggattacaggcgtgggccaccatgcccagctaatttttgtatttttagtagagacagggtttcaccatgttggtcaggctggtctcaaactcctgacctcaaatgatctgccctcctcggcttcccaaagtgccaggattacaggcatgaaccaccaggcctagctacttttttgtttgtttattttgagatggagtctggttctgttgcccaggctggagtacagtggtgtgatcttggctcactgtgacctccacctcctgggttcaagcaattttcctgcctcagcctcccaagtagctgggattacagacacccgccaccacacctggctagtttttgtatttttagtagagatggggtttcactgttttggccaggctggtctcgaactcctgacctcaggtgatctacctgcctcagcctcccaaagtgctaggattacaggcgtgagccactgcacctggcccgacgtccagctatttgaaaaagcattttatagggtagatgaattctttattatcctttaatgaaatctctgaagtcatagtataagaaatatatagcataaaagtaagcactttgaatatggataattttaagaattgtaacaatacatataaagtatggartgtgtttatcacattatgattttaaaattaacaagaactagaaatagtttatgtaaagttcccgatatttccatgtttcctataaactatattcctatatacttgagaaggaactataaatctgtgtaaagctgaaacttaaaatggcctcaggacttttgaggcttatacatgtattatatatgagttacagctgcaacatataaatgcatctacccctcatggctgaaacattctgaaacttatcatggctttaagttataaacagtttgtctgttagtgaggctcttctttatccaaatacttactctttgttgttacagatgcatcactagcatctacttacttgctgaatttgctttctgaggatgatgagataactgaaatatatgacaattttagcaattagattatattcccttctaatagtgataaaatgcttggaagtgattaagtggcttttttatcataaaaatataattattttgatgtttttactactgtattttttcagttttaaaaagctttttattaatgtaaactacaaaatacaggtaaaagcagagactaatacagtgaaaccctcatgtacccataagagcatcaaccctatcaatattttattatatttcttatctattattccactttttttttcttttaagtgtaactgatcccataagaagttgatcgcgtcttggtatgctttggttattgtgcaggaaaagagctccaactgtccytattaggcagttaattcttggttcagatggtagaggccaggagatccactaggataacacaaacattaaccctgctgaaaagttatgtattggaaagacaaaggaataaaatagaaaaaaatatatttaaatattaagacttggatttgatgccacagatgtcctgtaggctataagaagtttcttttcagrgggaataagtaatcaaagtgcagttataagcttcagaatatggagaaataaaaacctgcttagtcttcaatggatcagtataatgcctcaaggaaaagtctggcatttagaaacctttctgttcttaatctaccttgaagactatatcctcctttgtcccttaactttccttgttacttttctcccaatctattgttccttcgatctctgttgcttatgtttctatggtgacctcaaagttcttgtctgacttccttgtgtttgctactactattgtaccataccctgattaatttacagacaagcggccaagcacggtagctcacacctgtaatcccagcactttgggaggccgaggtgggcagatcacctgaggtcaggagttcgagaccaacctggccaacatggtgaaacccgtttctactaaaaatacaaaaattacttggccatggtggcaggtgccagtaatcccagctactcagaaggctgaggcaggagaatcacttgaacccaggaggtggaggttgcagtgagccaagatcacgccactgcacttcagcctgggwgacagagcaatactctagcaaaaaaaaaactattttaattttctctaagctcttccatgtattttgaggaaattaataaatccatacaacaagcacttaagaaagggcttatttttgtttctaaataagatacttctacaggctgggcatttttccactctaaacatggcttagagtacatatgatgttaatcattccttttggcatttkggttgagcattgttcttcttatccttgttttatgagaaggagctagaggagtagggttggatctcaggtatcatccagatagcatgaaaatatcactgtctgcagcaactttgaaaaccttgttttagtacttctcagcttccagcttttatacattagagcaggtctagctttttactggttcctcacccacagcttactctatcacagatatctcttactggcttatttgctttcttcaacccagtgagaggacagagcatttaaccattgtgggcttaataactttggaggacaaatttaatgaaatctttctcatctctagggcatgttggccattactgcttaaacttctgttttatgatacacttaaaaccaaaacatactcattatctattgccagtattgttagtaatattaataataatgatagataacttttattctcttactgtatgtcagacactgttctaaccttattttgtgccataacttaatcattactagctcccttaataaaatatatactactgttagcacaatttgcagataagagactgtaggacagagaggttaagcagcttgggcaaagtcaaactaattagaaagtgctagagcccagattcaaatgtaggcagattggctttagaaactgtgctcctaaccgtttacttcatactgcttctaatagacatttttagcgtgccttttgtcttttgaatgaaaattataatagtacacaggctaataatttgcttcacctttatttctaccaattctagatacttcattggaattttacgtaatctaaatgtagcaagagcaaatatgcatattaaaattacttgatataggtaatagaacagattttattggaaaggtttttagcagagaataaaccagtttactttgaaagctttttagctcctcgtgcctgtgttaattttctcatcacttcgtgagatacactgatcttcctgataacagctttggattaggaaattccttccacattggcttttactttttcttgactgcatttgttttataaatcaacatagttctccatctaaaattcatctaatttttttaagttcaacaaacactatgtgcaaaacattttactagcgtctgaggagggggaaggcatactgtcaccatcaagggacttactgtctagacctagcaaatgccaccttcccttctcctctctaaagcctgtctaactacccccatcccaattgaaatgaataatttcttctttgacactcttctgagtttgttcaagcactttgtataatacctgtactttgatagttgtatttctgtatctctggcaaaattattgagaacttcttaggttctctagtccccatcttgtagagatgatgtgtctgataatgcatctaaacacatattcatacaacacaatttataagtactataattaaggcataaaaataaaaatactgttgaaacacaaaagagaaaattgttattgtgagatttagaaaatcttgatggaaaaatattatatgatctgggcattccttgaaataggtagagagaaggacagcctattacaactagtaggaatgataaaagcaaagacacaggagccacaataagtgtaaggtgttagagggatggcaaatagtttgtgtggtgaaattaggatgcttggaggaggggtatggtaatcaataaagttgataagatagtttgggatcaagtggccttgccaagaaatttaggttttattctataagacatcatcatcctacaggaaggtttatcaggtagcaggatggaagattatatttaagaggaaaaagaaattaaatacagaaatcagttaggaagcaaagctgttgtctccagccataccaccctgaatgcacccaatcttgccgatctcagaagttaatcagtgttgggtctgattagtccttgggtgggagaaagcaaagccatcttactgtactaatcaaggcttgagtaacacaggtatgaactaatgcagcagcagcaaaaatataaaagaagggattgatatttgaaatatttctaaggtagatccaaggggaagtacttggtaactaactgagtgtgggagaattgtgaaacgggaaagtcaaacatagtaccaaaaatctgagccttattgaccgctagctcagaactcttacactaactttttccactaacacagaacacttatgcaatcttttatagagtttctaggtatattttcatctttctaaacatcctttaagtcaaatagtgcaattttttttaatttctcatttcttatgaatgaggaaactgaattacgtagtcatgacttgctcaatttcatgttgttattaagtggcagcactaggattcaaactcagttcttttactttcagttggttttgccgtgctgagtttgaggtgctatcagaatgtgaaaatgtctagtagattttagcactttatatggaagtagatgagacttccaaaaaaaagaaattataaataaagaacagagaaaatcatggattagaattttgaaactgcatggatttaggggattagctggataagaagagccaaggaagaagactggaaaagaacaaacaaagaaataagagaaccaggagtgtaaatgttgctagaaagtgagagcaaatatgagaatgaagaaactgattaaagaaagatactacgtgttatggagagagaaaaggtgaataaggaaaagtcatttaatttgacaagtaggagattattaaaagcttttgaggagagattttgggataaggcagagggccagattacactggattgaagaaagtatgtgagctaaaaaaaagacaaggcaatgagtttggactactcttaggaaatttgtttgtgaaaattataagttgtggcaataccaagataaagccttagaaatatttttttaaaaatcaaagcttaacataacttttcccttctttcccttcttctcttatatgtttatcatcttaaggataacagatgggtatatcttatgcctttcccctgtcattaccctgagtagaactccatagtgatctagggtatgtgatctgtctcttatccctacatctttgctaatacctcatgcaaagctgagctcaaggagccctaggatatcaacagtcaaatacagcattatttgcatttcagacaacatcaaagagttttaaatggaaatgtcattgtttaaaaaagacatatttttggcttcattactttctaaaaccttaatttaaaaaatttaatgtaatrtatttgcattatacctttgtgtttctgcttatttttatttaaaggatggaatggccgtatgcatgttcatgcaaaacaccttaacaagatttatgaggtaatgcagccttctttttaaaatatgatttctaaaagaccaaaaatagctttttgctattccattatttgtactagttaagaaataatagctaattttcaaattacatctattctaatgatgtactatttttttgtgccgtagaggataatcatttaattacatgttaatgaagtatatacatatgtattttaaaaataagagaaatgaaagataagaaraatttaagacatatcccctaaagagcttatataactagctgtatttaggaatagatactgggaaagttaaatactggtattagagcagaataataaagacactgatcaagacatgacacataaagtttacctaatattccaaattagtagaatgtgtggtgaagtggtctgtatccagaggagatgagaaaaagaactatggattggaaagtttttacagctttctgaggaatatgaattgactttgcacctaggtaaagaagcaaagaggaaaaattcttcttggcctatcaaggtatgtttgaggttacaaactgacatgttttggttgattagctttctactttcacatkccgaatgtagacaaatttaaaattatgaaaagkaaggaaattcttatttaagcaaggttattaattggacattactgtatttttggtacctattgtatctgagagtctagagagagtaatagaatcataacattactattctaaaatagtatcttcattgtttaaaccctattcacctccttttcctattgcatttggctttttcatagataaatctgaagttattatttttttaaataatcctttctacatgggagcagtgtatattaggaaattttcaattacttyagacctgcacctttgcattgtaggtcagaacctacaaaaattccatcttggaaaacattttagatttaccttgtattcacacacccctgcaaagtgggtctttgcaaacaggaaaggtaaaagatttatttttactgcaaaatcatgcctttatataggattagtctgtggattatttcaggcaacaatgagtagatttttgaaggaaacttcataacacagttttggagccctatcttctgtaacacatttccaacctttggaaatagccttgattttccaacttttaacctgataccaacaaaaatggacaaagataatatcacatggaattattctgaagagccagctgctgagaagttccaggagctgtaaattagacaaaagcatccatttatttgggagtaagttacaatatggctatagcttaaaaatatataatgattcagggaggtattttaatgaacttatgtggcatttattgtgaactattgtatgtttagtattacactgtttttcttctcatgatgtaaaggttcaagcttctgctatcctttgatgtgtgtttgtttttatgaagacagtgcaataattttgtttccactgcattttaagattttttaaaaaataacatttgtaaatgaatattgaaattaaaaatagtaacatcagttttttcttcaatatacagacttcctttaataagtgttgcgctggttcaaggttgggcattgggtggaggagcagaatttactacagcatgtgatttcaggtaggatgaaaatttcattaatttcttgcacaaatataattaacttgctcaaattcatttttgccttaatatcaatattttatatattcttaaataggataaacctattttcttttctgaatgttttctttttgtcagtcattaaagtagataattttaatctaataaaatttcatgatcacttcattactatgcattttcaaaaaattaacaaaacacatggttttgagattttgaatagagcaaatccatattagcaaaactcctggaaggaaagctaaggaaatatatgaaacttaaaaatccaaaagaattatacaaacaaaggtaagcaacattaaaaaagaaaaatagaatgcagaaagagagactgctgtagctgtcttctcaccaataaaaagagattttctgagatccctttgtcttctttttgctgtgatttatagcaactttgtgggactttcaggaagattagggactaaaaatagagaaagttctttgggaccaatagctcttcactcccaataattattctcagtatttgatagctatattatatagaaatgacattttataaaatctaatgctttagacatggtttaaactgctttctcagtaccattcccaaggcctactaacacagctagctataaggagaccaatacaatgctctgtgagttatctgtacaggttcacatactggagcctctttataatgcaaaaggtagtaaatatagcacaattagaggtaaaatggcaaaacagtaaagagcctgagcactgacgtctagtagacctaggctgaatcccagtttgacacttttatctacttgactttgagcaagtattttacctctcttcatctcagtttctttatctataaaatggaagtatctcccttaaatatttataaatagatttaaataagatagtgaaaatataggttttagcataatgtttaacctaaagtttacatcaatattcacataatattgtggcttagagttttaagattatcttatacaactgtctcttaccaatgccaatatgataacattgtggcatactttgaaactcattgtcttttcatttgggatgtttttcagtctctgggctaaccctggccttgccatttttttaaaaattcattatacacttgaccctagctaagaaaaatactggatatacattaagagaagacttctagtaaactttttgtctcagtttcagacactgaagagaaagtgattctgcgctggcatgtagtgctctacatatttcaaaacatcatgttgtacatttaaaaacttttaagcctggcgtggtggctcatgcctgttatcccagcattttggggggctgaaataggcagatcacctgaggtcaggagtttgagaccagcctggccaacatggtgaaaccctatctctactcaaaatacaaaaattagccaggtgtggtggcacatgcctgtagtcctacaacttgggagtctgaggtggaaggattgcttraacctgggaggtggaggttacagtgagccaagatcacaccattgcactccagcctgggcaacagagtgagactctgtctcaaataaataaataaataaataaatttgttgagctacaaattatatacaataaaatgaatccattttaattgtatgctgtaaatggattttgatgaatatatacacccatgtaaccacctccamaatcaagattgagaacatttttatcacccctatctatatgttttcatatgcctcttcccagtcagttcatatctctatttcaaggtaaacactgatcactttctcactttaaagtagatttttaaaaaagaattttacataaatacatttttacataaatatatagagtatgtactttttaatgtctgccttctttaattcagtgtaattattttgagagtcatccatgttgtaccatgtgtcaatactttgttcctttttaatgttgaaaagtattttattgcatggatattcaagtttgtttctgagatttatctgtgtttttgcattttccagtggtttgttcatcttattgcttagtagtattgctttctatgcctatatagcacagtaagtgttatacattaatgggcacatgagctatttcttgtttwggcctattataaataaagctgttgtgaacattcatgtataagtatttgtgtgggcatatgttgtcatatcttttgggtgaaaatctaagagtggaattgctggggtgatatggtaagtgtatgtttaacttaagcagcaaatatattggtttcttaaattttctaggtgggttgtataatttttattctcatgagcaatggaagaaagttccagctgcaccacatgaataccaacatgtggtactgtcaagctgtttagatttagccatttgacgggtgggaaccattgtgagagctcattgtgatttcagatttgaatttccacagtgactggtgttgaggaccttgtgtttattggccatatcttctttttctttgttgtttcaaatcctttgactctttaaagaaattgatttgtcttattattattaaactgtaggagttttttatatattctgtataaaattccttgggatagcaataattatagtagcagaggtgaagtatgctcgtgtgtctatgtctatctctactttaatactaaatactattattcacagccttaggagaaagaatactttctcccagcctgtgagtttttttttatcagtagtatctttggaagagcagaaatttgaatttttaaaatgttttcaacttctcatttgcactaactatacacttatgaaaaacttgacgaaatcatacatataactcccatatacctttcaatcagtttccccaaatgttagtatcctatagagccacagtgcaattatacaactgggaaattaacattgatacaatacttgtaattaatctacagacctcattcagtttttttcatttatcatactaatgtttttttttttttctggtccaggattcagtcaagatctgttttttttctgatataaatatagccatcccagttttctttctttctttctttcttttttcttttctttttttttttttttttttttttttttttgagacagagcctctgtcacccaggctggagtgcaatggcacgatctcagctcactgcaacctccacctcccaggttcaagcaattctcctgcctcagcctcctagtagctgcgattacaggagcctgccaccacgcctggttaatttttgtacttttagtagagatggggtttcaccatgttggccaggttggtctcgaactcctgacctcgtgatccagggcctgcctctgcctcccaaagtgctgggattacaggcgtgagccaccacgcctggcccccagttttcttatggttaacatttctgtggtgtatctttttctgtcctttcatttttaacttggctgccttgttcaaagtagattctagtagacaacatatactacggttttgcttttttattcagaatgacaatttctgccttttaattggagtgtttgttccatatacatagtcagtgttgcatggatataattgggtttaaatctgccatcttggtacaggcataattcatagatatcacaggtttggtttcctccagaccacccctctaaagttaatatcacaataaagtgagtcacacgaactgtttggtttcccagtgcgtatataagttatgtgtacactgtactatagtctgttaagtatgtaatagcattatgtttgaaaaaacaatgcatctatcttaattaaaaggtaatttattgctgagaaatgctaccaatcatctgagccttcaccgagatgtaatctggtggggaatcttgcctcaattttgatggcagctaactgatcagagtggtgcttcctgatgattgaggtggatgtgacaacttcttaaactaagacaacaaaagtttgttaaccgattgactgtttcacaaaagatttctgtgtagcatgcagtgctgtttgatagcattttacccatagtagaacttctttctgccgttgatttatcaaatataaatttatgtaatattctaaatcctttgttgtcatttcaacagtgttcacagcatcttcaccaaaattaaattccatcttaagaaaccacatattttgttcatccataagaagccattcctcatctagtcaggttttatcatgagattgtagcaatttggttacatcttcaggttctacttctaattccaattgtcttgctacttccatcacatctgcagttacttcctccattgaagtcttgaactccttaaatcttcctgagggttgaaagccaaccatgaggattgaaaacaactttttttttttaatttttaactttcatgagtacatagtagatgtatatatttatggggtacatgagatgttttgctacaggcatgcaatatgtaataatcacattatggaaaatggggtttccatcccctcaagcatttaccctttgtgttacaaaaaatccaattatactcttttagttatttttaaatgtataattaggttattattatattattaactatagtcaccctgttctgtacaatagaccttattcattctttctatttttttgtacccattaactatccccatccccctgccaactccacactacctttcccagactctggtaattatctttttactctctatctccatgaattcagttgttgatatggtttggctctgtgtcaccacccaaatctcatgttgaattgtaatcctcaattttggaggaagggtctggtgggaggtgattgaatcatgggggcagacttcccccttgctcttctcatgataagtgcgtaagttctcacaagaactggtggtttaaaagtgtgtagcacttctcctttcgctctttctctcctgctctgtcatgtgaagaaatgcctgcttccgcttcgccttctgccatgattgtaagtttctggaggcctccccagccatgcttcccatacaatctgtggaactatgagtcaattaaacctcttttcttcataaattacccagtatcaagtagttcttaatagcagtgtgagaaagggcttgtggaatattgctcaagaaatttttgccaagtacagtgaccctaagattttcgccagtgttttctggtagtggttccagagtttgaggtcttaaatttgtctttaatctattttttcctgtgtgtgtgtgtgtgtgtgtgtgtgtgtgtgttttgttgtttgttttctgggttttttctttttctttattttgatttgatttttgtctgtggtgatagataggggtctaatttcattcttctgcatataaatatccagttttcccagcatcatttattgaagagactgtgttttctccagtgtatgttcttggtacctttgttgaaaatgagttgcctgtatatgtgtagatttgtttctgggttctctattctgtttcactggttgtctgtttttatgctattttggtttttgtagctctgtggtataatttgaagtcaggtaatgtgattcctccagggctgttctttgtgctgagcatagttttggctattctgtgttttttgtggttccatataaattttaggatctttttttcgatttatgtgaagaatgtcattggtattttgatgggaattacactgaatatctagattgctttgggtagaatggacattttaacaatgttgattcttccaatccacgaacatgggatatcttttcatttttaatgtccacttcaatttctttcattggtgttttatagttttcattatagacatgtttcacttccttggttaattcctaggtatttaattttatgtgtggctattgtaaatgggattactgttttgatttctttttcaaattgttcactgtttacrtatagaaaagctactgatttttgtatgttgattttttattttgcaactttaggctttttccagacatagattgtataatctacaaacaaggataatttgatttcttcctttccaatttggatgtcctttatatctttttcttgtctgattgctctagctaggacttccagtactatgttgaataacagttgtgaacgtaggcatccttgttgtgttgtagatcttagagagaaggcttttaccttttccccattcagtatgatactaactgaaggtctgtcatatatgtatatggcctttattatgttgatgtatgttccttctatacctagtttcttggtagttttttatcatgaagggatattgaattttatcaaatgctttttcagcatgagtccaaattattatatagcttttgtccttcattctgttggtatgatgtttcacattgactgatttgtgtatgttgaaccatccttgcatcccagagataaatttcacttggtcatgttgaatgatctttttaatatattgttgaattcagtttgctagtattttgttgatgatttttgcaccaatattcattggagatattggcctatagttttctttttttgatgtgtctttatctggtttggtatcagggtaatacttgcctcacagaatgagttcggaagtatcccctcctctatttttcagaatatcggaatagtttgagtaggattgccattagttcttctttaaatgtttggcagaatttagcaatgaagccattgcatcctgggcttttctttactgggagactttttattacatcttcaatctccttactagttattggtctgttcaggttttgaatttcttcctactcaatcttggtaggttttatgtgtctaggaatttgtccatttcttctagatttcccaatttattgacatgtagttgctcattgtagccactaataatccttgaatttctgcagtatcagttataatgtctcctttttcatgtctggttttatttatttggaatttctctttttttttttttcttkgttagtctggctagagatttttcaattttgtttaacttttcaaaaaaaacaacttttkgtttcatkgctctttkgtattatttyctttctgkcttttttttttttttctgagacagagtatcactctgtcacccaggctggagtgcagtaggctggagtgcagtggtgtaatctcagctcactgcaacctcctccacctcctaggttcaagtgattctcctgcctcagcctcctgagtagctgggattacaggtgcatgccaccatgcccagctaatttttgtatttttagtagagatgggctttcaccatgttggtcaggctggtctcaaactcctgacctcgtgatctgcccgccttggtctcccaaagtgttgggattacaggcgtgagccaccatgcccagtcaatatttttttaatttagatttcatttatttctgctctgatctttagtatttcttctactaattttgagtttggcttgctcttgcttttctagttctttaagatgcattattaggttatttgaaatttttcttgttttttgatgtaggcacttatagctataaactccctgttagtactgcttttgctgtatcccataggttttggtatgttgtacttcattatcatttgttctaagagaattttcagtttccttcttaattttttaattgacccattggccattcaggagcatattgtctaatttccatgtatttgtgtagtttccaaaattcctcttgttattgatttgtagtttccattgtgatcacagaagatgtttattattttaattttttgaatattttaagatttgtcttttgaccaaacatatggtctacttttaagaatgatccatgtgctgaggaaaagaatgtgtattctccagctcttggaggaaatattgcatgaatatctattaggtacatttgtttctatagtgcagattaagtctgatgtttctttgttgattttttgtctctaagatctgtccagtgctgtattagtccattcttgcattgctataaagaactacctgagactgggtaatttataaagaagagaggtttaattggctcatagtcccacaggctgtacaggaagcatggctggggaatcctcaggaaatgtacamtcatggcagaagatgaaggggaagcaggcacgtcctacatggctggagcaggagaaagagagaaaaggggaagggtactacacacttttaaacaaaatctcatgagaactcattcactatcacaagaacaccaagggggaaggctgcccccatgatccaatcacctcctcctacaacattagggattacaattctacatgagatttgggtgaggacccaaatccaaaccgtatcaaatgctgaacgtggggtgttgaagtctctagctattattgtattggggcctatctctcactttagctctaataatgtttcctgtatatatctgggtgctccagtgatgggtggcataaaaattgtcatatcctcttgcttaattgacccatttatcattatatagtgactttcttcatctcttcttaacaatttttgtcttgaaatctattttgtctgaaataaatatagatactcatgttttctttttgttttcattgtcatggaatatctttttccatttctttattttcagtcttcgtgtgtctttataggtgaaatgtgtttctggtacacaacagatcatttggtcttttttttttttttttaatctatcaaccagtctgtgtcttttgattggagagtttagtccatgtacattcaatattattattggtaggtaaggacttactcctgccattttatttgttttttgggttgttttgtggtcttctctttcttttcttcttcctttttgtgatgatgatgttctcagtgatttgatttagcttcttgcttttaattgttttgtgtatcttttatgttttttggcttgcaaatactgcatcttattaggcttgcaaatactatcttatcacccattattttaagctgataacaactgaacattgtttggataaacaagcaaacatgcaaaaagaaaataataaaaactttatgccttaactttatcctctggctttttaattttttgttgtatactgtctatgtcatgaaaagttgtagttattatttttgattggttcatcatttggtctttctacttaagataagacacagttacagtgttttaatattctgtgtttttctgtatgcttactattatcagtgagttttttaccttcagatgatttcttatggctcattgacatcgttttctttctgattagagtgctccctttaatatttcttgtaggacaggtctggtgttgatgaaatccctcagcttttgtttgtctggaagtctttatttctctttcatgtttgaaggtatttttgcagaatatactattctagcatgaaaggatttttccctcagcacttgcagtatgtcgtaccattctctcctggcctgtaaggttttcactgaaaagtcttctcccagacatattggagcttaattgtgtgttgtttcttttctcttgctgcttttaggatcctttctttattacagaccatgtttttatccttgacctttggaagtttattaaatgctttgaggtacttttgtttgggttcaatctgctttgctgctctataaccttcttgtacttggatattgatatctatctctaggtgttggaagctctttgttattattcctttgaataaactttctaaccctgtctcttgctctacctcttctttaaggccaataactcttagatttgcccttttgagactattttctatatcctgtagggatgcttttttatcttttttcttttgtcttctctgactatattttcaaatagcctgtcttcaagctcactaattctttcttctgctagatcatttctgccataaaaagttatgccataaaaagttctgatgcattcttcaatagtatgccagttgcatttttcagctctagaatttctgcttggttctttttatttcaatcttgttcttaaatttatctgataggattctgaattcctcctctgtgttatcttgaatttctttgagttttgtcaaaacagctactttgaattctctgtctgaaaagtcacgtatctctttttccagtattggtctgtggtgccttgtttagttcatttggtgggtacatgttttcctaggcggccttggtacttgtagatgttctttggtatctgggcattgaagaattaggtatttattataatcttcacagtctgagcttgttcgtagtggtccttcttggaaaggctttctagatattcagaaggacgtaggtgttgtgatctaagctgtatctgctttagagggcacccgaagccccgtaatgctctggttcttgcagacttctggagatactgccttgatggtcttggagaagatccggaagaattctctggattaccaggcagagactcttgttctcttccctcactttctcccaaacaaatgacatctctctctctctctgctgagccccgtggagctgagggtgaagtgaactaagtaaccctatggccaccgccactaggactgtgctgggtcacatctgaagctaacacagcactgggtcttgcccaaggccttccataaccaccccctggatactgcctatgttcacttgagggactaggactctacaatcagcaagtggcaaagccatccaggcctgtgttcttccctgcagggtggtgatttccactagactctggaaaagtccagaggtgctgtctgggagcctgacactagagtcaaaaactttagaagtctagctggtgttctgacttgtctgagctgtaactcagaccacaagacatagacctttccagtcttttctcccctttccaaaggtggaggagtgtcgccccatggccactgtcaccactggctcacagggaatactgccaaatgatcattaatattacagtaaaaatctgttagctagtgtagccaccttcatcaataaccctagctagatcttcaggatcacttgctgcagcttctgtgttaccccttactgcttcagtttgcacctttatattatggagatgacttctttccttaaacctcataaaccaacctctgctggcgtcagatttttcttctgcagcttccttaccactctcagcctttgtagtgttgaagagagttagagccttgttctggattagcctttggcttaaggaaatgctgtggctggtttggtcttctatccagaccactaaaactttcttcacatcggcaataagactgtttcgcttccttattattcatgtgttcactggattagcactttgaatttccttcaagaactttcctgttgtattcacaacttggcttttaccctgaattttatggtaattactttcttgctttcctttatagttttataasctaatattctataataaatatattttttatttttttgacttcatataaatggcatcatatagtagtagaaatagaatgagaaaagtttcagtatgctaacttatgaaaaacagtaaattttatattaatttttctttttataatttatgactcaggtttcaattcatcagttaaaatatgtcacttcatgctcacacaaatagagattttctagtttttttggtatataagaccgtttacagaaatcctagcctcttgaaaactagtgttcaataatgcacaaaattcttatgcacaataaaaaaaagttattttatatgacagtgccctctgctgtcatcagtgcagattgcattagaatgctgctattattacattttattctgcgaagaggaagcagtcattggctttatgcttgatatgagactaaacaggaaatgctgtatgtgtgaaagtattaaatgcattcctcactttacactgaatacaggtagttatgaaatatataatttcaatacatatataaatataaaacgtacatctaagtatataattaaaagaattttaaggctgggcacagtgggtcaggcctgtaattccagcactttgggagatcgaggtgggtggatcacctgaggtcaggagttcgagaccagcctggccaacttggtgaaaacccgtctctactaaaaatacaaaaattagccgggcatggtggcaggcgcctgtaattccagctactcaggagactgaggcaggagaatcacttgaacccgggaggcagaggttgcagtgagctgagatggcggcactgcactccaacctgggcaacaagagcgagactctgtctcaaaaagaaaaaaaaaaagaatcttaagctacatgcaagtgtgcattattacactgaaaaatcctctgtgtaaaaggaaatgaaaattaagactttttagatgttatttggaacaagtgaaaaccctctaacatagattccggtgttcacctttattagacttttgtactattcttcatattgatttctcatctatgtttaagtgtagttagggtttaggacaaaaaagcacaatagcaggaaaaataatcagagattatttaatcctttaatactgctaaattgcctagctgtcattctctaattgaagaaaatgtaatgcatcctagagcttcattaaatatttaattttatttgttacaagatgtctgagggtactgcctactctcagtatctggatataccaggtgcttttgttgagaagcttctgatgaaaacctatccatttttgaaccagcttttctgaaagtggtgtctgtttattaaacatatttcagcacccacatgtgctaggcacagccattcacaaaccttgtgtcttggttttttgtttcatttttctagtaatatgtttttgttatattttacaaaattattggtctgcaatcgattagaaagtttctttaaaaatgaagaagaaattgatccttgaccagagaaatttgacaagcactgtcctaggctactcagcccttttaaaacccgcataccaaaagcaactatagttcttaaatgttagaggctaatagagaggattgcatactgaatgaactacattactagccccagtttccaggaagtgataaatcagtacaagttcctctagctgattttttccacttaattttatcagtacctcatcagttactttctatgacagattattttaattatttcctaagaatgtctgcttgttctaaaaaaacaccgaaagctttcatagcgtttgctaaaaagataagttccttctttatatgtgttggcccttttcgcttgtttaactttcttaccttggagaattgcctggaattcactcaactgacattttcatccatgccaatggaagtacttcagcagatggagatacacttaatatgaatatataaaagaaatgaactcatgtagcattctaacactgtccccttcccgcaaaaccctgtgagcaccagctggtaatagatgtaatgtatacgtatgtcggaaacactcagttctactttgcatagatagaccctcacttgagtcatacttttcatgtaaaatattccaagagaaaatggcttttaaaaaacatttttaaaagtaaaagactaacatgaattaaaaattggtatttttcaatggtcagaatctagtcaagcattatgtttccattttagtgacaaaattaatgtgaggaaatgaaaagctagaaatgtggtaatatagcctctcattttttaatccaccttgacaaattaaagatatttagaatgaaatataaattaagaaaatgctaatacatgtagttttctattgctgctataacaaactaccacaaattctgtggcttaaaacaacacgttattatctcacagatgtataggtctgaagtctagctgggctcagctggtttttctaaaccttgtctcatgagaccaaaatctaagtgtcagttgcagtgggctctgaagactctaggggaggattcattcccaggctcacccaggttccaactggtagaatttggttacatgcacttgaaggactgaagtccctgtttccttgctgccagatgggggatgagtctttgctcctagatgctttctgaattccttctcatgctttccatgtggctcctccagcagtggtgagtcaagttcctctcatactttgaatctctcttatttatccttatgctgcatttctctgactacagctggaaacatttctctgcttttaagtgttctcatgattagattgggtccactcagttaatccaggataattttcctattttaaggatttaactttagttacatctgcagtctcttttgccatgtatggtaacacatgcacagttgccagagattaggtcatctcttcggggccaatctacctaccacgtatgggcttggcatagggaatttaattgtcagatttgttgctaacttttatatttctgtttgattgccagtgaaaagtgctaactttgttactctaagttaattttgtaaactgtatttttatttttttaaatgcttgcttagatgctttttagaaaacagtaatagtacccacatacagtcatgtattgcttaatgataggaacacattatgacaaatgtgtcattacgtgattttgttgttgtgcagacatcatagtatgtagctaaacaaacctaatgataccatctagggtgcagcttactacatacctcggctatatggtatagcttattgctcctaggctacaaacctgtaaagcctgttactgtattgaatactataggcagttgtaacacaatggtaagtatttgtgtatctaaatgaaaaggtacagtaaaaatactgtataaaagataaaaaattgaatgctcatatagggtatttatggtgaatcgagcttgcagkactgaaagtctctctgggtaagtgagtgagtgagtggcaagtgaatgtgaaggcctaggacattactgtacacttagaawgtactccttttacttttacacataaaaaattaaatgtaaacagcctcaggcaggtccttcagaagaaattccagaagacagtattaactgtaacttttgtactatataagctttttaattttaaaaaacttttttattcttttgtaatagcacttcatgtaaaacacaaacacattttacagctgaacgaaagtattttctttttttatatccttattctataagctttttctatttttattttattcatcttttttaaaagtttttttttttttttattaaaagctaagacaaacacacacattagcctaggcctacatagagtcaggatcatccatatcattgtcctacccctccacatatatcattgtcctacccctccacatcttaccccactggaacatcttcaggggcagtaacatgcatggagctgtgatctcctatgataataatgctgtcttctggaattcctcctgaaggacctgcctgaggctattttacatttaattttctacatataaaagtaaaataacactctaaaataacataaaaagtataggtcagctgtggtggcttatgcctgcaatcccagcattttggaaggccaaggcaggaggattgcttgagctcaggagttggagaccagcctgggcaacatagtgagacacaaaaaataaaaaaaaatagccaggcatggtggcacacgcctgtagtcccattcctgagggaggatgaggcaggaggatcgcttgaggccaggaggtcaaggctgcattgagccattatggcaccactgcactccagcctgcgggacagagtgagaccctttctcaaaaaaaaaaaaaatatagtacagtaaatacccraaccattaacatggtcatttattattatcaagtattatgtaacatacataattgtatgtgctatacttctgtacaggtagcagtgcagtaagtttgtttttaacagcatcaccacaaaaatgtgagtaaagcattgttctatgacattacaatggcgatgatgtcaccaggctatagaaatttttcagccccattataatcttatgggatcattgtcatacagtccattgctgactaaaatgttgttattcagtgcatgactgtataccttatttataaaggattctctgatatagacattattttaaacataattatacctgtagtatggatggttagcttggtttcaagatcaagattccagaatgtgcttcaggaagtacttaaaacactcattccttgattctactttctaattccagttattctaaaaacatgggaaaatagagaaaaatctctcaaaactaccttagaaaatagaaaatgacaaactcagactgcttggcttttagcatcaacttttggcaaaaaaaaagcatgtacacatttttatatgtctaatatttaatattttactattgaatttggtgtgagagagaaactggaattgtattttttaatttttaattttgaaataattacaaacttgcaggaaaggcgtgacagtaatacaaataatttccctgtgccattcattcaggtccaacaatttttaacattttgctattgtgttttatctttgtgtatcatatatttttttcacccagactaagggtaaataaagtattgtactgtgtccaaaagttacttacattagttcactgttgtttttgttgtttctccttctttgatgttgaaatggtctggggtgaatggtctcgttgtctgaggtgttatccgagctccttgtctcacaatcaagaaaactaaggagcrtggacgcaagggggaggttggagtcaaagtttaataagtgaaagaagaaagctctttgtagtggagagggggcctgagtgggttgctgtttttacagttgaatccaaaagcttttataagaaactcccctcatctctgtagctatttgtgtaactctccttatctctgcagctgtgggtatgtcttgggtaagcacaaagtgaagcttctcttgtttgtttaactgcaggtctgtttcaggtaagcccacccccattcctttgcaggttcccacagagcctaccatgtatatgcctgaaaaggggaggaacctttttcctggaagcccgctaatcacacaaaggaaaaaaggcttctctgttgggccttgctttcttattagtgtagttgcagtttagtttttccccaggttgttctgtttgtgcctgtagctgtgatttttcaggctatttctccaaggactagccttagctgtctgcctgatttttccttttcttatccctcaatgtgatttcatttgaaaataccttgatttagtttttgcattcagtttaaattttttcccttgtttccagccttattttatgtcttgaatatgttagaatgttgtagtgaataactttatctatactttttagtaatactaatggcatatcttaaggataaacactagaaataggattgctaaatcaaaagttaaataaatattaatgagttaatgaatatttattaattattgcctaattttcttccataagagatagacaagtcttgcattccctctagtctgtttcacttagccttgtcaacagagcctactattaagctttggaatttgccaatttcatgggtaaggaacaatatttcagcayagttttaatatgcatttcttttttttctctttttttttctttttgaggcaaggtcttgctctgtctcacccaggctggggtgtatagtggtacgatcactgctcactgcaacttccgcctctagggctcaagtcatcctcccacctcagcctccggagtaactgggactacaggagtgtaccaccacacttggctaatttgtgtattttttgtagagacggggttttgtcatgttgcccaggctggtctcaaacttgtgagctcaagtgatccacagcctcccaaagtgctgggattgcaggcatgagccactgcgcacagcccatttatattaaagtgaagttgattatagtttcatatgtcttaaggaccattaaaaaawtttttttggtgaattatttattcatattttgcttatttctcaacaggatatttgtttttttccttcaattttttaaagttcttcaagtattagggataatgtcattatctgtgaagtgttttgcatatatttgctcagcttgttttttgactttgcttgttttttgtttttattcttttttgccacacaagcctttttaaaaaaacatggtccactgtgggaggccgaggcaggcggatcacaagatcaggagtttgagaccagcctggccagtatrgtgaaaccctgtctctactaaaaatgtataaaaatttagccgggtgtgatggcgcacgtgtagttgcagctactctggaggctgaggcaggagagtcacttgaacctgggaggcggaggttgcaatgagccaagatcgtgccactgcactccagcctgggcaatggagtaataagaccctgtctaaaaaaaaacagacacacacacacaaaagtagtcatatctatcaatctttttaaaagttgcatctggatttcaagtggtagtttaaaagcctttccatatatcaaggttatrgaaaagttcatgcgtgtttcttctagtacttgaatggttttgtgttttacatttatatatctaatccattttgagcttattttcatgtatgctgtgagtaatggatcttatttcatcttttttccaaatggcaatttgtcccaacactatttgttttagaaagccttctgccttctgtgttccagtgatttgaggtaacacctgatcgtgtactagatttccacttgcagttaggtctgttgtttccaatttttctctaaaatgattaatgctgtgataattaccttatgcaaaaggctttatccacatttcagattatttcctgaaaaaatcatgtaagtagcacaaatacttaatgaaaggatatgcagtgttcaaggcttttggtaatagccacgttatcttctaggaaagattctactaatttatattaccaccagcagaaaataagtgtctatttgagagcatcctttcttacaatgagtataatcttttaagatatcttttataattttgataatcaaaaattaaatttgcctttttagagatttttggtgatgcataaattttcatatgttggttgatttatatgtgtatgaattctctgcattttcttttcccatttctcctttgggatattgagctgtttatacaccaaatgaaaagcacatttttattcctccctagtgaaataaaattctcaactatccaatttagagcctgcctatctgttttcaacctctaatgctgttttcatcaatataaataaccctcagccaaggtattagcatttccagctgctagccattagttcaaagtatattataaagaaagggagctgtaaacgttcttatcccaagggaacttacaaggtagccttttgcactttgggaggccgaagtgggtggatcacctgatgtaaggagttcaagaccagcctggccaacatggtgaaacctcgtctatactaaaaatacaaaaattagctgggcttggtggcgggcacctgtaatcccagctacttgggaggctgaggcaggagaatcacttgaacccaggaggcagaggttgcagtgagccaagattgtaccactacactccagcctgggcaacagagtgagactctgtctcaaaaaaaaaaaaaatactggcttcataaagtacaatattacacacacttgcacacacaaataaatgcatgcacacacacaatcccgcccccaccccaattcaaaaataacaaatcccatttttgatttggaagtaactttactctgaataggagatgtccacctcaggaagtagtcacactgcccatgatgctttgttttgtagttatcacattacttggaagttcttactttagagctgtgacatcaagaaaatttacctctgatcatgccaggattactaaatgttaaaatcagacttcagtatcacaaaacatttttatatctgctccccccctcacaaccacacaacaaataaaagttttcacacattcgactatataccttcttactcaagcagtctgtttgcatataatgaatggaaactcatgaagccaatcatctgagacttggaaatcagaaaggtgagattatagggagaatttttgggttctttctcttttccattgttttgtgatgttatagatggtagaaaacaaaagggagaaagtgccaggaaaatatacgtgtgaacaagtaagtttatgttcgaggcataattttaaagtattgtttgtggtcagagatgctgttgcgaattctataattttctatgctatatttccccatgcgagcaagtttactttgttgtctttggccctttatgcaatcagtgtaaaaggactagccgtttctggccctacactaaagcttatttatatttaaatcagtgattccaaactttaaatgtataacatcatgttaattttgtaacatcaatggttttctttaaaatttcmagatatttatcttgttacttgtattggacagttctaagaaatcttagagggataactgtcttacctgttttttaaaaaagatcagcttgcaatcttctgcttcaaccatatctgtattagaatacagtattatttctaactttatttggcaatataaaaattgaatatttcttgtgctctccatttataaaaccaacatcgaagaagaagagtatttgctggttatacagtgttgagtatagctcttttactctgaatattttagagattatgtgattttagtccaggggacaactttatactacttcactagcagaaacactactgttatttttacggacctatcaataccaccaacttaatagtattaaaagctagtatacagagtttattatgtatcagactacaaaatatatacaacttttatatttccaaataaaagtaggtaatactgtattctcttgtagatgtgtttgaggcaatttcacacaattttttaaaacatacagacacactctatctataaaagaattgtggagtacatatgttcaaagtatctatcaagagacacagagatgttaagtaacttcctaagatctagagatgaatcttcctctcctctttgtaccatgtttcttttgcctttgctgtattttacaatgtgtggatatgtagccagtctagtggccatcctaggatttcaagcccagcagtctggcttctgagtgtatgcacttcacatcaaagctgtacactcttccaattcaattatttatatttccatccttcatcacagaatttactagaagtaccttgctttaataatcaacattacaaaaaggctgtttttttgcaacttttccactaaaaacttcctattttagtaaaatttggtaatttctttttagaatgttcttgaatacatttgttcaagacctgaaacttaagagttaactcatcaagaagtagtaactcactgaacagtccttcctggtatcatcaacacttgactttgtatcacctgtcaaaggtgtaactctttccccagttatgagtagtctttcttataacattgtttcatccagacagtagtaacaagaaatatatccacatttgattaatctcatctcctttgccccaggatgtcagaggaaattttaaacattgccaatgattatgctattaaacagttagaagacacttatcattcttttrcttgtcaaaataagcaagtttaatatggttttataaattgagtctgtcattagtcttcaaaattataagagctaagtcttccattactctacrtagattatcccttgcaataattatattactaggtaactgcatctaaactctagaaagaattagtgtataatcctgtagggtctatcaggaaactattttgggatatatcttgttgttaatataataatgtccttcttaaattaggtttttcagcattttaaattttatatttaaactttcatttttaggttaaaagagtcctgtaaaggttaccatctgaatgctctgtttattagaggaaactacttgtgttcttttatcaccaatgaattttttggtcatatttatttaatatatatttaatgtatatcagtacataagcacacccgaggtatacaatttgcaaagaatggatgttagattttgatcacaaaaggtatttttacaaagataacctcaagatttgttggagttgtaaaatatgattccaaaagacacactttaccttataaaataaggcaaatggaaaaaaatcaccatagagatgatgatttttctttagaagcaaataattccaaatatgaatgtgcttacataggtaataacttttgttgtcataagctcatctacattattccaacatctaggactttaaccagtttttatgttcagctgattctaaatgaatctattcctggcatagtcctttactccattataggcacagctctgaaccaattctaggattcaattcagaacagttacatatttagtgtattatgtaaaaagctttataggattgggttcaatattgacaatattcctatttctaagaatattagacattatttctgtaatttctattccttttgatattgttttaacaaggcagtactcctcttacaatattgtgataaattcagatttttataagacttgttcttttttcctcccaattttaaaattatttcttgaaaactattatttttcatagctatttgcctctagaagcaattgttcataatggaggcatattttcctttgtagaaattcacagctgtgaagagaaagtttcccagtgagttaataagttggcatttgtcagaattctctcgggtcaaagactgagttttttgttcttagtgctaatagaaccaaatcacctgcatttgagtatttaacacgttggaaagccaacccaacttaaggtcttcttttttgtaatgagtaatttgaaagtgaaagcttcttgaagcatgcagtcaaaataaaacgcatgggcgtttatttagtaaagctaaatcgtgtagctttactcagtctgttgaactggcaaatgttaactcccctttattgttatactttcttattaatcatcctattcataaaaatcccatgactggggaaaatgaacccgttagggaaactcactgctatcagtytaatccaagccactatcaataactttcttactggtatccctgcttccacctcgtctagctattatgtgtaccatgaagataactgaagccaacctgcctgggtttaaatcctagctctgcaatagctgtattgccagttccttaaaaaaaaaaaaaaaaaaaaggtataagagctttgaaatgctaaataagctcttcatgcacatggcaactagagcagcccttgtaaaatgtcagatgttaatgctttggttgacctcctctaaataactttacacttaaaaaataaaatccgaactccttactaaggcctgttaagtatgcttctcattttatcccccatgttccagttacactgtactcgtccccagagatactaagcagttctctacttcaagacttttgcacttgcaattccttcttcctggaacatcttttcccagatttttgcattgctcatttcctcaggtggctgctcaaatattcagtgtccttcttcatcgaaaatagcacacccccagcacacatatcctcaattcatttgtctcctgcctcattttctttttctctttttgctataaagcactcattgccactgactttatatggtttaatgcctttctctccaaactgaaaacagctcctgagcacaagggttttgttttggtcattcctgtagtctcagcacctaaaccaccacctggcactggtagttctttgtaaatacttgctgaatagatgctgtatttaaaaagcatttttccccactaaggacttttgagaaccttaacttactatgcttttcggtttgtttttcttagtatgcacctaacatttcctactcccatactttcacttgatccacatcctctcattaggtcaccactcacttaagaaagatcaactttgggcttttagaaggttcttgtttgcaaagggtaaacaagcacaacaaaaaatgatactgttttcaaagggaagttttaaatactattagtaaattaaattctagatgaaacagccatatttttcaaacattgtttttaatatacctacctataaagatctatggagaattcayatcagatcatgaatggatagtactttatgattagagcatacagagagagttacaattaagcttttcttttttcttttacaggttaatgactccagagagtaagatcagattcgtccacaaagagatgggcataataccaagctggggtggcaccacccggctagttgaaataatcggaagtagacaagctctcaaagtgttgagtggggcccttaaactggattcaaaaaatgctctaaacataggaatggttgaagaggtcttgcagtcttcagatgaaactaaatctctagaagaggcacaagaatggctaaagcaattcatccaagggccaccggaagtaattagagctttgaaaaaatctgtttgttcaggcagagagctatatttggaggaagcattacagaacgaaagagatcttttaggaacagtttggggtgggcctgcaaatttagaggctattgctaagaaaggaaaatttaataaataattggtttttcgtgtggatgtactccaagtaaagctccagtgactaatatgtataaatgttaaatgatattaaatatgaacatcagaattactttgaaggctactattaatatgcagacttacttttaatcatttgaatatctgaactcatttacctcatttcttgccaattactcacttgggtatttactgcgtaatctggaacatttagctaaaatatacacttttggcttaaaaattattgctgtcaattccaataataattcttagcttataaccaaagagcagtgtttaaaaggagagcttctatacaaaacctattcctggcgttacttttcatacaatttttgttctgttttacctggaaataatttaccaaaataactgagtgttgctgctaaagaacaaaagtggggaggtatcagggaacaagaaaacaagaaagggtatgatcaatcattttcttctgctccaaacagctggagtaaaattcatgggaaatggcccttcatttaaaaaaagatgtacctcactacccactacaaatttggaactttgttcttttcaataattagttttctattgtaaattacctactaaacagtggtagccatgacatggaaagtcaactgattctacaattggacattcatttgtgtgccctggaatttccaactagtaataaacaactactgttgatgtagttttaaaccacttgaagggactcatgaagcatcctgcaacataaatttgcatttttacatcagatttcttttttttcctgaaaaacaactaaccttctaacaactatctttcaaaagtaaatgtaataaaaatgcacaacataaaatgtttatgatcccagcaatacactttttaaaaaatgtgaaagtcaaagaattaagttctagttctgactyatcacaagaggtcaaaagtatttgctactgtaacattcaattcacatttgagaatcatggtaaaaataacttgyatttgccttaccatcatgatcctactgttgagttaggaaaatatggttagacagactcacattactttttttcagaggtaaactctagattactgtgtcaacccaatactatttggccatagatgtaaaaactaccaaataaaagtggattttgtggtctacaacattttgtgtaaagtgaattcatgtctgctaacaccgttaagtctgccatttaatccagagtgttagactactaatgaatatggtaaggaaaatataaaatattaacggtatatgctatttgaggaattttaagtctcacaggctttagttttatttccatacatatttattatatacacactgcctatagattctgtttaaataatctctaagaaaaaaatcaaacttttctgagcaggtgattaagctgaaaacaaccaattaaaaccaccactttttaagtgacctttggtcacaaatgtcaaaatgtttccacaccctttccaccctcaaacaagagacaaactgtttttgataaactctagtatttattaaattataaattttgtaatcaaaaagaaaaatgcagaccaaaaaaacctcaaactataagactagacakcaaagcctatgggaacaccatgaagtgtgttacaaacattctgaaacataagttactggctgttttcatttccatttcaataactttactataaaatagttgttattcatctattttgaaatcccaaattcacatctattcatacattaaattatgtttcctgttcataatatcaaacatctcacaggtgccaaattttagtaatggtcttatgccaatccatgcagaaaaataagacacaatgcaggagtcagatgaggaccattaatgcacagataatacaaacacactggccaaaagaactacagaagtttttaaaaagtataaagtaaacagacctcaagaaaactgggttattactaaacagctctcaactattaacacccaagttccttacattaaataaatttctcaacagagacatgttagacattttaattatgagtctatccttcccataccccttcccaccccaactcccaaaatgcactactagggatgagtataatgttatgtgggcagaaatttacaggtaaccctttcaaccttgagcatggagctgaagacatttttatttaaacttcagttactgtgcactgtccatcaggccttctagatctgacactgacactcactgttccaccccctgctactgatcgatcagttcccgatcgatctgatcgatcgggtactgtctggtttgcattagaaaccaaaagtctctgttgggtcaaggagtgctgtgcaacaactgcagatacatcctcactatcactactggcatctgattcagtttcttcaatggaggtgtctggtgctggtaccctgcctgaagatggtgattcatgatcttcttctccttctcccctatgactcctttcagctgtgttgtctccactgagttgtaaatgagcaaaagagtcttccagagaagtgcttgcatcaggggatggtgttgcagggcttgttaactgaccatctactgatgttaggggccttacagaagacactaggggctgaacagaagctccactctgtgctgatacactgtccgctccgtcagcagagctctctcttgctaggtttacggtattagcatcacagtctagcctaagtccagctactcccttctttggtatatctattatatctcgcttaatcttcctgcgacgtccatgttcatttctcctatattgaaccatgttttcaagatcagcgacatacagaaagccagcaattaacatttcagtgttctttttacctttggaaaaagcatcttccagctctctactagtgcgctcatcgtactgccaccacccatttcttccttcataataccatgcatattcaccatttcctctacttgctgccttgagttcttctggtgacaacaaggttggcttgtcaaggaaatcctcgggaatttcttgtcgacaaagagcacaccgctttccaagccatgaagctccttttacacatagatagcagaaaacgtgcttacagggcagactgactggatgaacacatgtttgcagacaaatggcacattcagggacggttaaagaaggtgcagtattagaacrggactcgttcgctttcctgtttgtaggaagcatgtttattgaatgatcaatttcaccacagccagccatcctaagaaaaaatacatataatattaaagtcatgttttaattcttgcaatatcttaatttaacaattatgaaaacactaaccacctatgatgtgcattatatgcaagccacatactagacaatggggatatgaagatgaaagtagaggaaaaactctccaaccgatgaaaattttttgtaagcatctacttgtacataccttgggaatgtataaaaattccatcagtgcacttaacagatcagccctggagaaacacactgaagaactatataatgaaaagctgcatccagtgaggggaaaaggataccttgaatcatggcagctattatacagtgaaatgaatgctagacaagaaatctaaaaatctgagttttagagtcctttattaattatgtgctcttaggcactcagttaaaccattagtctaaatttccttacctgcaaatcagagtttacaaagctcaggtaaaaatggacaaaaaaagtgctttgtaatcactaaagcttcataaaggtaacaatcatataagaccaaaggagaaaataacatgaatattgaagatcccctgaagaggaagaagaaaaaagatttgtcaaattggatgtatctagcttaaacactgacataaaatttataatttctgccttattgattcagataaacatttactaaacacctgccatgttccagatacaatactaagtactgatgggtctaaagataaataagacacacaactactctgttaaataaggaaacatacatgcagataattacaatatggcctgattcctgcgtaatcaaaatgtgttaacatacttactaaaataacagtaagagagagatgagaggatggacataggttagaaagtttagtgttcattcagaggggctgggcagtggagcagattccaggcagaagcacatgcaagacactgagtcaaatagtcatacaagcaatggaagagcaggagatgaaggtgtaaaggtaatcaaaagttaagtcatgaaagccttattgtgttattgtgccctgccaaggaaacatctaatttttttccccatggtaaaaaaaaaaaaaaaaaaaaagacattttaaaaggggagaaaataatggagtaaaccactgataagtaaaaaagactgagaaataaagatgaagatgtcagagattggaagcttaaaatgaatgacaatctctctgccagctaattctgccattctaaatgggtcagtagttacaaaagatatagtcaacaagaatgcttacgctcatcaaaaattgaaaaacaataatcctaggctatcatcacagcacattcaatcttcaaacaatccttttttttctttttactgccttttctgtgttcttggttcctcaatagacaaggctcaaaaagatggcaattttctagtaaaggaagcaacacagtaagtttttaaaaagatggcacatatctagtaaaggaaccaacacagtctcaatggaagaactgatcactaaaatgtttaatttccaaattattttcaacttttaataacatttccaatcaattcctttaccagaaattctaggttatagacatcaagaaagtacaactttttcctaacctatggaaagttctaagtcaggggtgtctaatcttttggtttccctgggccacactggaagaaaaagaattgtcttgggccacacataaaatgcattaacactaatgatagctgataagctaaaaaaaaaaatcacataatgttttaagaaagcttatgaatttgtgttaggccgctttcaaagccatcctgggccacatgtggcccacaagttggataagcttgttctaagtaaaccctaataggacgtcttaatatgttaagcactataaaagctttcaaatattttgagataaacacttgccttcaaagatcttgtaacttgaaacaacaataagttacaaaagaaggcatatgtttttaaaatagccaattacacattccctgcctatttcctcccctaaaagaattggctgtgcacacattttgttaggttttcagaaactttcatccctttcgatttaggtcaaaaaagttagtttccataaaattcctgaaaatctttttgttccaagttccatatttatttaaagctccaattaagaaaaagaaaacaagaaagtgatccatttacaagtaataatttaagaaagattctactcatgattctattcatgagactaaatagaaaaatgggctgatgaccaccattactttggaaaaacaacagcaacatcttcatataagaagtctacatcttaaaccatctaagtaccttatgaacaaaggacaggatcataaactgaaaacataaataaaaacagagtctggtaaaatgaaaacaagacacccaacatgtcacgtggaccaatgccatgcttttaaatacataattccaaacctattgtatttgctttaagtaaaatgggcccaagaagtcagttttccatcacatacagctcgtttatctacagaaaaaaaagtttccaacctaaaaacattatcctccaccctacttaatatgattaatattttgcatgactcttactcttgcatttatgaataaaccaaaacacataatttcaaaactaagaaagcaattacaatcatcccaggagaaggcatgaattataataacataattggaaaggcaaaacaatcctgtttgtgcaggtattttggttccatcatcagaatgaagtgaagttggacaaagttaatctgcaaacaatggacaccagacagctaaatggtcattatttcatctgaagcactcttaactatcaatttgccatagcaatttataaattctgattctgtttagcccatcaagtatactgttagtctatcaccaactaacaaatgggcagaaaaacttagtgatatttcttatttaattctgaatgaggcacatgcaataagtaagatagagataaaatgtgtaacaagatagacacaaagtaaccccaaactgctagtctacctataagacatacttcaaggctttttaaaaaaccattttaatctaccctacacagtctctgttttgcagttccaatgatcttaaaataggtgggagactaaatgtatgcagatgatcataccaatatgtaaataagaaagcttttcccctccctttgtgtagagcaagtattaatgctaatcaaaagaggtattccctatctcataaatgtctcagaaaattctaattttgaaaaagggaatttatttccagtttactaaactaagaatttaatacacagaaatttggagtgacgttagtccaattctattaataagtataatacatcatttactttcaaagacgtttttactgaattcttcatgtgatattccaacttttaagtataaatccccttcttccaatagataaaccatgtgaaatatttctgccagactaataagagtctattaatactaagtcttcttctcaagaagacaaaatatagaggggtatgggcagagttagtggaaatctccaagaactcagatttccttgaaacttcttggacaactagtcaaatgaaaggcaaaattattataagcaaaaaagatctttagtatgtgtagtattcaagaaatttttagcttgcaataaaaactccaaatattaaaaatcagatttttaaagtctgaatttagaatccaattacagacacacaaaaagggaacaatcctacatataatttcaaggggcttaaggatttctatgaagctggtccacatatgaaccactaatgagacaagaggagttcactgaaaggttttacgtcaggaaataacagccagtttagtagcttccagaccatttgaacagcaggttggaggaaag

SEQ ID NO: 94952 - DNA, 78237 bp, Homo sapiens
ttcagtaagcttatcttcagatcttaatttccaacacgctttccttttagtcttggcttctgtggaagctcattctcctggttttcttacccctcagctcttcttttcttttaggtcttctctcctgcccagcctctaaatactggtgttcctctgggtttagctcatctctaactgcttttatttaataggtgactgtactatgctcaaggttctatttatccctttacgggtataacttccaacactgaaactgcagcccagacttctccctggaggtttgactcatatatccaactttccattgggcaacttcacctagatggcccatagtcatgtaaaatccaccatggcccaaagtaaacttagtttccacttcaacttcacttcccctgatatttcatacctcatttagtaatatttccactcacttctcactcaaaccaaaaacctagaagtcatcctttactcagtcaagaagttgttttacctcatgtttcttgatatttcccactcttcttcatcctttttattaggaacctacctaatcccttcatcctttttattaggaatcctttttattaggataccttcctaatctacctaataccttcatcctttttattaggaatctagctcaggccatcactatctctttattgtaatgctgaatgaaatagtcatctaatgtaccatcttcagttttgtccgtatcaaatccctttagcacatatgcagagtgatatatctaagataaaaatgaaaccttatcagtttcctccaaactctgtaatgtgctagactttgtcacagagtaggtacctattcttgtttgtcaaatgaataaatgaagaataagaccagaggcttctcagtatccaaggttggagttatctggattctagattgtatattgtctaccatcctttgagaatgtcatgtatcaaccaaatttttgtttctcagttttgcttggaacttcacaaaaccagaatgaatagcatatttttatagtgtataggttgtatatatgaacagatagggtctgtatggtgaaaatcaaacctatgtgcctatatgcttatcttttagtataatctattaaatttttattaataatttcttaagagaacttttcaaatataaatctttccctcccttacactatgtagctggagttcagtgttatgaaacaaagattccttctcatcacagtttgacaactggtgttttgatttctagtctttagagttgtgtaaatttgttctaacaaagaatcattttagaactgtttgcttaaaaaaaacttgccaaaacaccaaaaagtatatgtgatgatataattagatatttaaatatgctcatgaggtcaaaggcagggaagcttgggcttggtatttcctttactcacttttaaatttttgtacaatgcttcagtgtgcattttttccctgtgtgttaaaatatacataacataaaagttacaatttaaccatttttaagtgtgtaagtacacttaagtacataaccatttctaagtgtataagcattaggtagattcacattttttgtgcaatttcagtatactttttcctgaatttatattgaaataatttgatattttcatgattgagatccaaaacttgtattgaataagtagagttttctgggggcttatcaatgtgttttgaagaaaaatgattttttttttaattttgattaaggagcttgcattatatccaatcttattgggcttagggagagcaaatgtcaatgggaatttatggaaacatgtttattaatttggcttatctgaactttgtttccaattttagtttaataaaattattaaatattttaatacaattattaaaaatattaaatatttaggaagctgaaaatattttgctgttgtgacgagtctcatttaatcatgattggtatcctattcctaacagtagtagataagcaacagtgttgtagaaaataatttaaaaattaaaaagacatttggccattttccccttgtattttgaaatgatttctgagtttagaaatcagacattatagcataagattagatagaaattatctttatgatataaatgtaatagaaacagtgctcataggtaaatcaatcttgtgttgttttaacaaaaaagtatttgtctattgctttactagttcatgagactcttcttgattctgatgattgaatcctttataagatattgaataatttcaaaagacagtagatccaaaatgtgaaatattatttagagatgttcagagaccatataaacccaattttgttaattttttttaatttaacttatttaaatgtgattcctttcttgagaaatgataatttggagacttatgcatagaatattaggaagtagaaaggattgaattcaatgtctgactaattattggactcaactacaatatgaggttaagctttaatttaggggacagaggcatgacaatgcactatttatcttaataaatttaaagcgtttgttgtaagctgctcaaagagagactttggttgtggggcaggagttgggtggaaggggtattggtacttcagcctcttgccttcattctcatgtgaggagagttagctttgaaataagctgaaagaccttgtagtttataaaaatctcctggaaagatgttatggtcattggaatcagttcagtcatctaatgagctacacattggctggagcacacctgaactgataataaacttggtttcttttggaaagtgccaaaagtacccatcttcccaatacatacataacataaaatttaccatttaaccatttttaagtgtatagttgaattgtgttaagagagaattgactctcattcaatcatcatcatcataattatgttttgtatttaccaagaaggaaaactgatactcaaccttcaactttttctagtctgtttaccttaatattcctactttctcaccatcaatctgccaagatcttcttgagggaatacagatgtaggggtgtaggactctggtggtggtgaagcttagaaggagatttggagtcgtccacccttcagtccgctgaggcaccatttccatctcccctcctcccaacctgtcagagccaatagcatggctactgaaagaacagcgtgattgctctctgaatccagacattgtcctttcctatgacagacctggagaaatatcagacaactgaaccttttccagcgtattttgaatgtacgtaatcttggctgtagtcatcagcagacaagataattattcgttcacacatgctctggccaagttttagctcatttggagacttgtaatgactttggattctgtcctttgtaaaatgacaacctaagaatcatgtctttttactggttccaagttttaggtgggattttgatataagttttataatcatgtaggaattgtgggtcaaagcaagaaataagcattatgggcaggtggattcttttgcaggctagatgtaaaacatgtatttcttgaaggcttggcattctaggagggaatgtcttgatttaaggagatatggcagagaagagccttgtaagagaaagctattctgacatgagtggttttgttcttacaaataaacagtgactcaagtcagtagcagggcgatagactgtggagaacgctagcataatatcatacttggggtataggaaccatatacattcatttagagtagcattaatttcccatttaatatttgttagaaactattagagattttatcactctgctgacaacaattctatttggaacatgagctgcttatataaaaatcatttttaatgtgaaagctctcattagcttaaaaggcaaatgaaatggttagctttaaaagctgagtcacagtctcatttaccatcagaattcacagttttcttctttattttaattartagattaatcctgtctcagcaatgccattaggtgcctgccttgatggtgtggaaaaatacacacaaacatctgatatttctgagcatttgggttgtgacaaatttaaatgtgttctaatagatcatctgtgtataaatagcttaagatttatagatgttttttaacttaaggatgaggaaactgaccactataggataattaaaaacagcaactctttgtaaatgcaggagctaagttgtyaaatgccagggcaccaacaggcaatattctgtaatctaaattgggtaatttatatcattgtcacttgaagatctgatataaattggagtcactgaatcatcccaccaacatctcataactaaagcaaattttgtttccttttcatgggtagggttttagtcaattgaataataaattatcctgtcttttctgaatcataggataggcaagcttctgtaggcagaactgatgaaatgaggccccaaagaagatattttaccctgttttaaaatatttccaatgaaggatatggtccagactactttggttatacttttcaatatttgaaatagtaatcttatgtggttgtttgaaaaatattttcaatttatcaccgaagatttgtctgaaatgttcggaagtcaggaatgaattaacttctatataacacccaatatcctggtcagtacctactcatagtcctacagttactgggtgtaaaaggcaatgctcctcttcctttgaaaagcataacctttcaagcgcttacagtttataaagaacagtcacgcacattttctcttttcagtctcacaatgacactatgttatatgaaaagattattaattcctatcagaaattaagattgagagaggttaagtgactcactcaaggtgatatatttagggagtggaataattacaactcaagaacatggtggcacgttcctgtaatcccagctactcgggaggctgaggcaggagaatcgcttgaactcgggaggcggaggttgcattgcactgaaatcacgccactgcactccagcctgggcaacagagcgagattctgtcaaaaaaaaaaaagttatttttgctccaaggacaaggtactttgcactctacattttgctgactctttggcatgccctataaaattgggcatggtaaacatgcattacgactcttttggaaaatttgttcctggggcaatcacgtgaattgggatgtggttgggagcatcattaattgagtctgtggtcagaacagagactagtataaagaaatacccagtgtaagtggcatcagtcagatattcagtgtaaatgaattgggaatgatagacacagtgaacggtccaagactgaaatgaaatctatcatctcatgagtattcaggggactggaactatattttaggaaggacgataggtgagaaggcctagatacaatcaagaaggaaacagcctcaaaaaataataaacctgcttaagataccctcttctgaatggatggagtttgatgatctgttggccctgttggtcagggaagggtgaaatgggctgaggaaactggaattctgtaacactaagatccaaggacacttccagaaatggcatttacaaggtgcaagtgttccctgtaaatcttctggcaaagggctttgaaatttaacttatattggaagaaccttaaaaagttagtagagccattcatatttctgtttggtttaagctgtgcctgctaataacattgcactgaaatgcaggcgtgaattcctataatgttaaaatcaaattgtttacctcagtttgaaaatttgctcaaatgagagtgattggctattgttagctctcaatttgactttcaagacaccttgaaatagcttcaggaaaaaaacgtgatttctagttaagctgttcagttaagcactttgtgatacaaagtatgttaaggtaaaaccttttatttaaatcaactttaagaaaacctctttagaaagttgcagagtataaatgaggaaacctttaaaaaaatacagctttatttcttttacgtatctattgggaattgagctaggtagtcgaggcaccagcatgaggttcttaagaaatctgctttaatgaacaaatcagagtgatttgtacttaatacttgattttgtttcaaaggccacataggcatttgaaaaataagtttttgcctgaatcctgtaatttcagctttcttagcaatttctcttttctgaaacagtgaaaatgtaaactttagggtagcctctgttcaaataatcacaatatgtgaattgaagtttgaggagttcatagagtgttactgaatttgtctgttttctaaaggaaattgattcatttttttcaaattattttacaggatccttcaaaccaaaaatgtggtggaagaaagaaaaccgtgtctttcagcagcatgccatcggaaaagaaaattagcagtgcaaatgactgcatcagcttcatgcaagctggctgtgagttgaagaaagtccggccaaattctcgcatttacaaccgttttttcactctggacacagaccttcaagctcttcgctgggaaccttcaaagaaagacctcgagaaagccaagcttgatatttctgccataaaagagatcagactggggaaaaacacggaaacatttagaaacaatggccttgctgaccagatctgtgaggactgtgccttttccatactccacggggaaaactatgagtctctggacctagttgccaattcagcagatgtggcaaacatctgggtgtctgggttacggtacctggtttctcgaagtaagcagcctcttgattttatggagggcaaccagaacacaccacggttcatgtggttgaaaacagtgtttgaagcagcagatgttgatgggaatgggattatgttggaagacacctctgtagagttaataaaacaactcaaccctactctgaaggaagccaagatcaggttaaagtttaaagaaatccagaagagcaaggaaaaactaaccacccgcgtgaccgaagaggaattttgtgaagctttttgtgaactttgcaccaggccagaagtgtatttcttacttgtacagatatctaaaaacaaagaatatttggatgccaatgatctcatgctctttttagaagctgagcaaggagtcacccatatcaccgaggatatatgcttagacatcataaggagatacgaactttctgaagagggacgtcaaaaagggtttcttgcaattgatggctttacccagtatttattgtcatcagaatgtgacatttttgatcctgagcaaaagaaggttgcccaagatatgacccagccattatctcactactatatcaatgcctctcataacacctatctaatagaagaccagttcagggggccagctgacatcaatgggtacattagagctttgaaaatgggctgtcgaagcgttgaactcgatgtaagtgatggttcagataatgaaccaatcctttgtaatcgaaataacatgacaacccatgtttcctttcgaagtgtcatagaggtaataaataaatttgcctttgttgcttctgaatacccactcattctttgcttgggaaatcactgctccttgccgcagcagaaggtaatggctcaacagatgaaaaaggtctttggcaataaactctatactgaagcacctttgccctcagaatcctacctcccatcaccagaaaaattaaaaagaatgatcattgtgaaaggaaagaagttgccttctgatccagatgtgttagaaggagaagtaacagatgaagatgaagaagctgaaatgtctcgaaggatgtcggtagattacaatggtgagcagaagcaaatccgactctgtagggagctctctgatttggtgtctatttgtaaatctgttcartacagggattttgaactatctatgaaaagccaaaactattgggaaatgtgttcatttagtgaaacagaggccagccgcattgcaaatgagtacccagaggattttgttaattataataagaagtkcttatcaagaatctatccaagtgccatgaggatcgattccagtaacttgaatccacaggacttttggaattgtggctgtcagattrtagcaatgaattttcagactccgggtccaatgatggaccttcacacgggctggtttcttcaaaacgggggatgtggttatgttctaaggccgtctataatgcgagatgaagtttcttacttcagcgcaaatacaaagggcattctacctggggtgtctcctctagctcttcatatcaagatcatcagtggtcagaatttcccaaagcccaagggagcttgtgccaaaggggatgtcatagatccctatgtttgtatagagatacacggaattccagcggattgttcggaacaaagaactaaaactgtacagcaaaacagtgataatcctatttttgatgaaacttttgagttccaagtaaacctacctgagctggccatgatccgttttgttgttctggatgatgactacattggggatgagtttatagggcaatatacgataccatttgaatgtttgcagcctggatatcggcatgttcccctgcgttcttttgtgggtgacatcatggagcacgtaaccctttttgtccacatagcaataactaatcgaagtggaggaggaaaggcacagaagcgcagtctttcagtgagaatggggaagaaagttcgggaatataccatgctcaggaatatcggtcttaaaaccattgatgacatctttaaaatagcggttcatccattacgagaagccatagatatgagagaaaatatgcaggtaggagaaacaytcacactctccttccctatccctgcttattcctacccgtataatgttttattaataatctgatttgcaaaaatttatcagaaagattgtttaagtctgggtgtggtgactcattcctgtaatcccagcactttgggaggctgaggcaggtggatcacttgaggccaggagttcgaggccagcttgggaaacatggtgaaaccctgtatttctaaaaaacatgaaagttagccagatgtggtggcgagcacgtgtagtcccagctacccaggaggctgacatgggaggattacttgagcctgggaggtcaatgatgcagtgtgctgtgattgtaccagtgcactccagtctgggcaacaacagaacaagaccctgtctcaaaataaaaagaaagaaagatgtgtaaacctgtgtaccattgaactaagttcagtattgtctgtgataaaacagatatattttatgtttctaactgtgaatgctatgttaagtttggactgaactaagatgtagcaaaatgctgtatattaaatatccttagtacaaaactgaatcaatatatggaaatgtgcatctgaaacaatgggaaccaagtagaatatacaatatatgtgtgtaatacataaaaaatttatacaaacatacacatactaattaccagtgtatatataacatatttgcatatatgatcatgaaagaatttgaagtgatataaaacaagcataatgtctattaggttactttttagttttaaattaggtataatgacaacaataataaattactccccacaagaacaagtaaaactaaacaaaaaaaattggcactcaaactggttgaaaaatatttaaccttgtcttagaaatgtggtttaattgaaagaacatgggttcttgatcaaatctatccctgtgcgatcttgaacaaattatttcaggtctctgatcatcaatattctccatataaggtaagaaaaatagttacacttatcgcaaaattattattagagtaaaattagggtatatggaaattgactagcctgaacatttagaaattcaatattaagttttctttccttcattaatgcttataatctgagacagtggtaaacttaaaaaaaattacttaatatacttattaggctagtgttattgagatgcaaacaataacagatattcaccgagtacctgcaatgtgcaaagtggatattattcaattcactttatttctttagctgatgtgtttataataatcctcaccaaaaatccctgttttcaagatagataataaatttgaaaatgttaatgcatttcctaagtattgcaagttaacagatagcaatgttagcctttaaatccaggactgccagtatttaatagaacaacagggtgactatagttaataataactgtacattttagagtaacttaaagagtctaattggattgtttgcaactcaatggataaatgcttgaggtgatgcataccccattcttcatgatgtgcttatttcatattgcatgcctgtatcaagacttttcatgtaccttataaatatatatacctactatgtacctgcaaaagttaaaaattaaagaaaataaatccaggattgcctaataccaaaatccatttccattatcattcatgtgcagaaccacaaacccayggcacagttaaatacttgtggtaggttgtcttagccaccatttaaaaaatagagtcccaatatcagcatattctatgtaactttttctgacataattctagtactattataaatccctatgttagattagttataaaccatttctgcacttaactttatagattagactttacatattttatataatcttgaaatatgtactttgcatattttatattatgtatttaaaatacatagaagtgttatagataaagtgtatccaggtagcgttgatagttcatattatcttaacataaagtctttggggttaaggattatttggagtctaatcagaagaaaaatgaaggtgatcattgtcatgaaattcatgagacacctaataagttaggtactgttcactgtgggtgaaatgtaaaatagtcataatttctatttcaaatgaattttttgaaaagactgtaacatggacaaatgtagctctacatgaaatgtgctttcagtgtgtgtgtctgtcaggtgcctttctgatgaagtgacaaaggaatgccattgattagtcagatggagggtggtgagcagtagcatcctgctaccttgaggaaaaaagcccaagtgaaatgcactccagtrtacaacccctgccattctgttttcctgatcaccatgatacaaatcaaacatgacattcatgatcagccagtacttagttgtgtgactatcccagtggtctgctttgaaaagcactgcatagccttgtgtcccactctgctttgctttcatgggttgtttgtggtgattgctaaaaattgagcaagatgaagtatagttatgaattagccctctattatcttttaaaaatgaatgtacttttctgtaaacctgggagtgctggcggtgatgtgtcaggtggtcagaagtgtgattccatgttttcttcctcacagaatgcaatcgtgtctattaaggaactatgtggactccctccaattgccagtctgaagcagtgcctgttaactctgtcatctcggctcatcaccagtgacaatactccttcagtctcacttgtgatgaaagacagctttccttacctggagcctctgggtgcaattccagatgtgcagaaaaagatgctgactgcttatgatctggtaggaaattgcgactccatatttttttacgtgtgtgtgtgtgtgaaatcacaaatagcagggactcctctgtggaactccaatgaataacacagggtgactacctttgaaacatggattggaggtagcatgcagagccggcccattcagcttctgctaagtctcagtggaaaactctgagaaaatgacttgaacctggagctgcacaggttataagtggaaaactctgctttagcaaggaatgaattattaaaaaaccctcaaaaatatgtacactcatcatctaaatgactttagagtgcaatataaccatttaattatatacctatgggaagtaaacatgtctcagtgctgccttatgatggttgagacaaaatttatatagaatctatatttttcagctaattcctagaatgtaccccttatcctcatggtccaaaatgggtgctgagctccagccataatatctgcattccaaccatcaggagtgatgaaaagatgtaagacatagcttcttcctttaaggacgtttctctggaatagaatagatcatgtttgcttttatttcatcagcctggagttgacatatagccacacttagttgcaaaggagaatggaaaatatcatttcaaggggctatatgctaaatgttgtctcttctgttactaggaaataaggggagaatggatattaagggacaaccaatagtctgctacagaggtgaataggcaattcacttaccccccacccaataacaatgaaaaattaaaaacatttaactttaaaataagtttttaattagaaattaagaaaatatagtaagatattcccctcaccattaaattgacatgttttttctctttaaaaatagtacctctgatcaagaatttaagcaaatggatactctcattcatctacttctagtggaaaaataaattgatatagtatttcttggagaaacaattggcaatacaatttaaaatgcttaygagtttgatctatagagttccttttcttggatttattctaagccagtagagagaagcataaacatttatgttaataattcaacatagaaagattagctaagtgaaatataataatctatattatagattcctttgaagatattaaaatcatgtgttagaagaatatgtaatggtatggagaagtccttacaatgttttgtagaaaatttgattacaataaaatgggagataggatttaaattacatttctatgaatatgcccctaagttgctagcaggttattaatagtgaatgtttttatataagagtgaattttattttcttatttatgcttttctgtattttttctatattcaccaaactctttataatgaacccaactaattttataattgcataaaataaaccttaaggaagaaaagatgaagattttgtcattaaaaaacaagtagaagaaagatattggagataaacattctacgaatgaaaaagaaaaatttccacagggcatgttctgcttatgaatgaccatacctgttataaaatgtacttcatggttgctagggggaaagtttacctattacctgtatctcatttttcatgaaatcaactttttcatcataaaaatggggactgaaagctattcagtgaataggtataattgccatctaagaggtgaaattagggtactagttgccatagagacagacagtagaaatcacttattcctccacttctcttttaagctaagaaaaagaaatcattcatggccagggaggtccctgaagctggcctgtaataagcagaaggatacctggtctggggctgggcaattkccatttcacacccccgagtgtctgacagtgtcttattttttgttttatctgctgaagccaagactgaaatattagccttttctcatctgtattattamaatgcaaattgtaattgcaggcagagcatggttttcaaagattaaaataaaaggctacggtggaagcagaaatacttataatgaagtctttcatgtacagttctctatggaaaaccattttgggagggaattgagtgtaaatatccttataccacatggtaaacttggtagaattcaaaaatgattaaaaacaccattgacatctctgttgagtatttatttgggrgatggggtgggtagggacagatacatgtaatgatgatattggccttgaaattaaaacaccatttttactttctaggatttgcattgtattggttggcatctttaatgctcttagtgtattactgtgtgttaattttaaataggtcttctaagatctcttcagatctggagtgaacatttaaaaacatagatcaaggggctggattacacttgcaatcccaggactttaggaggccgaggcgggtggatcacctgaagtcaggagtttgagaccagcctggccaacatagtgaaaccccgtctctactaaaaatacaaaaattagccgggcatggtggcacccgcctgtaatcccagctacttgggaggctgaggcaggagaatcgcttgaacctgggaggcggaggttgcagtgagccgagactgcgccatcgcactccagcctgggtgacagagcaagatgcaatctcaaataaaaaataaaataaaataaaataaaataaaataaaataaaataaaataaaataaaataaaataaaataaaataaaataaaaacatagatcaaatcaagtcactttcctgcttaaaatcctccaatgggttccattaaaataaaacggaaactcctgactgtggctttacaaggtcatttatgatttgcccctgcttgtctacctcacctgcctctccatccttgcccaatctcactacatctcccaacctcatccgcctctcacaacctcacccgtctctccagcctcactgcctctcccaacctcacctgcctctccagcctcccctgcctctttagttttacctgccgctcccaactgcacctgcatctccagcctcacctgcttctcccaacctcacctgcctctttagttttactgcctctcccaacctcacctgccagtccagcctcacttgcctctctcacctgcttccccagccccatttgcctctcccaacctcaccagcttgtcccagtctcacctgcatctccagtctcatctgccttttctagcctacctgcctctccagcttcacctgccttccccaacctcacctgcctctccagtctcatctgcttctccagcctcattctcacaccctctattttgctcactctcttccagccacactggctttctttgcacatatttatggggtatggtgtgatatttccgtacatttatacaatatgtaatgrtcaaattagagtaattagcatatccatcacctcaaacatttatttcttagtggtgagaacatttaaaatcctctcttctggctattttgcaaggtacttaccactgtaccaccgacaccacctcttctagctatttggaaatatgcaatatattattgttaactatagtcactactgtgcaatggaacaccataatttattcctccttatctcttaattcttagctcaaatgtcattttctcagaaaagccttccctaactactctcsccatmcatycctttgtcacatagccatgttttatttccatcttcctgcttagaagtattgaaaaatactttgcttgaactttttaattgctgtcctcttttactcctcaatttgaatgtaaactccgtgaggttagatcctatctgtatatttattactgtcacctctggcacccaaaacaatgttggcacatagcacgttatcaggtaatgttcactgagtaaaaacaataaataaaagcatctattgttggtgaaaatcgtgtagtttccatcctataactgaacatgtttgatgataaattattaaatccccttgattttacctctctgacaccacccttgctgaattgttccctatcttatatttggctaaaaaacttacagagtaaggcaaaactatggagacagtaaaaagattattatttgccagggcctttgagtgggtcagggagggatgaactggtggagcacaaaggatttttaaggcagtggaactattctgtatgaaactgtaatggcagatacatgtcattatacactagtcaacaacctatagaatgtacaacacaaagagtcaaccctaatgtcaactatggactttagctaataagaatgtatcaatagtggcttgtcaattgtagtaaatataccacactaatgcaaaatgtaaacagtagggaaaactgggaggtgggggtagagttagagggtgaggactctgtactttccatttactttttatgcaaacttgaaacttctcgtaaaaatacagtctaaccacccccccaacctaccacagactattaataaaaactgatttggatgaataagggaaaaaagcaaatccaagatttattgcctagtggtgtggttggtgtggggagaaggtattccaaaatgaacagcttgggttcaatttagacttaagttgcttaaatttttggatttcttgaaaatggtaatgaactgtgtagatgccatccaagaggaaaaattgttaccactaaaaaatgcagaatatgtttagaataaaaacaacctgaaatctttcctgaacagatacaaatgttttcttttttcagtatggaaagaaagaaatcaggcaacttggtagcctacatttgttgaaagcaaacttgagtgcatcaaattatactattatcaagggaaaataaaataaaatattctagaaaacactgaccctgagttcatctgcacagattttttcccctaaatttagctttccatatttattacccactataaataaataaataaataaatcccactatttattagtcattaaatatttgaaaatatttcctcctgagggttttaaaattcagtcttaaaagtcattttttttctctctctctttttgttttggaaacggagtctcactctgtcgcccagactggagtacagtggcgcgatctcagctcactgcaagctccgcctcctgggttcatgccattctcctgcctccgcctccccagtagctgggacaacaaacacccaccaccatgcccagctaattttttgtatttttagtagagacagrgtttyaccatgttagccaggatggtcttgatctcctgacctcgtgatctgcccgccttggcctcccaaagtgctgggattacaggtgtgagccaccgtgcccagccttaaaagtccttttaaattagtcttgcaattataattccattatagcaactgtgttggtatcaagaaatcaaaaatcaaatgtatttgtagcaaaatgggcctattgacgtggcagaatttcagaagaaagggaaggcacactctcccctgtcttagcacatcttacttaaagtatacgttttctgtctgcttcctgggacttgaaatttcaaaattacaaccagttccctagggttaagactttttatcttttttaaaatgcagcaacatccctgtgagtaataacrcactgggttatcagtaattcattcttactttcgagtaaatttagcagatcctgttctacaagcaggttttaacctgggagaagcgagagatggtaatgacagagggttcaccaagtctgggtaaggtgaagryggggttgctcaaagaattgcaatttgcttacgggcagccctgtttactgttaccattaatactctcaataggatgttgccatgtaaatgcctatctartattttgtgcaactgaagcagagatgactttgctgatataaaacgtgtcacggctggaggtgggaagtgtacagcttctaaaacagcactagagggaactgggagcactatcaatcaataactctggcaagtagaaaaggctctaaaagtcgaaggtagaatggatgcctctttcgcaggctaaatacacaaagagaagagctgttggcattggattgttcaccacagtgccatttcagtggccctctgctcatcaggaaagttttccagaaactgtccctggagcttaatttgaaatcagaagaccatttctaagtgactcttccatttattttactgcgattcttcttcttttttggctcaggtctctgaaagagcaagcatcacttccccactctggatttttactttctctggaaaaatatcccactgaagtaggtagtatagtcacagagtcatcgtcttttaaggctgataatgtcatataattatattttgcaaataaaagtaatatgactttttttcatttaggattcatcttaaattgggtgttgttaagagtaaaaattggttacagaaagagttacttagtgttatagccagaaaatggagatgtttaatttgataaacattttctgaactccttttaatgtgcaagccactgcgttaaatgttgtggaaggttcagcagatcttgtgcttcagcagcttaccagcaggagatgtaacctggtgaggtactacccagccctaggagtctactattggggatgtgaatatgttactcatcatttaacatggagttgtaatagcaggggattacactggaaaacattttgtaattttagtagggcactatcaaaactagtttgtttgaattggtttgacttttttcattctgcaatcgtgtttttatgcatgtagacttagctccagccctaatgttttactctagtcacatttctacgttttattctgtgtaaccaaagatgaataagcagagacggaatcagcacagatagtcatgatagaacgaatgacagttctgtaactcaagagaaataggaaaatgtgtaggaacacatatatttgccacttgtaaaataacattttctcatttgatatgccattttgtatatgtctttaggcttttaattattcaactaaacaagaatattttggatgcctactatgtgcaaggcagtgtgcaaggtgctagagaaagaaatagtatgaagcaaaacttctgtccttgaggaatgggcaaccctgatgggaaaggaggacttacacctaaaaagggaagtagtcacacgcagtgttcagagagttgaccacatggtattttatgtccttagctggagtcttagatcatttagtcctatgatagacttttcacagtgacttataacacacttcttctaccacctctgccacctggtactcagcagaattttatttscaaatacatttgaaagaaaaatattatctgactttatatactttcttctttagatggccgagcttttccttttcagtgttctcacctttctaatttttcatgcagtcaagaagtattttcctaatatatttgatcatttccattattttaagttgttatgaaaaatatttgggtaatatcttaaatatatcattctgaagtggaatagctacaggaggttgcaactgtaagaaataagcccaaagcattctccaaggtgacttctgtgctaccttatttaacattaacataaaagttaaaactttactatggtaagaacaattktttttaaatttgttgttaaaaaaaggaaatcaaaacaatytagagaacataagtcaagggttatttaatcttttactaagtcagttgggggtgatttggagagcagttgatagtgctagagtgagcaggaatctagcaaaaaagagctaattgctgtctaatcacgcttgcaatggaatgaatacactagtaagtattacagttaagccaggcataatggttggcttaaatacattctgttatatcagtgttataaccagtatatattcagcctcaggatgggaaagagttgtagttatgtctatagttccccgatttagttttgcttattgaaatccatttaaattaaaattggattcagtcaaagatagtctcattccatcactgtctcttattgtgaagtttgtgtggaactctattagtttgcatttcaagaagtatctttgcttgtatagtaatagaacctaaaaaaagaactgtctgctggcatgtgcccaaacagagctcggtgtttaaaaacaagatgctgtrttcytggggtatggaaacttccttcacatgtgggtacagcaatgtctttggacacattttctgtgtaaggggaaaattatcagcatcttgaggagtggcaaaatttctacttggtaccaggatctctaggaccatggatatcagagatacatatccataagcaagtatttcaggttggcttttttttgtggaattttgtccatgcatactcaaagctggctttgcattcttgaatcctcaggctttgtaacacttttggttaaaggtagtaaggtagtcaaattggcctgaaaattctggagaaggtttactaaggctactcatctggatattttatgaaggagttaaatcgtaatgacagctggataaaaacaaatatttctaatgactactcaaggtatagctgacaactgtttggggaacaaaacaacaagagaaaaaaaatgatctgtttatgccaaaagggccccctgaagtagattttgtcaccattgtgaatgtggagacaaacgtcctctgacttgctgtgtgcaagttcacttgtcctgcgccattacaaatcaggcttgcaaatgtgatgcattagtcccaggacagagagctctgttgcatacaccaaaggcagtggacttccagtgaacttgcaaatattctgactttacacttgtttctgtatgaccgagagttgaccacactgacaggcttgattgcttaaaaacaacatgccaatctattagcaatgcttttatttgtttcattttaaatatttaaggaacttgagaatgaaaggaaataatcttcattctagttagcaaatatatatgtaagagcaatctgatttacaaatgtaccaagtttaataaragtcatcttgttttaaatgatctgaaaagatgagccactgcagaacyatagaatcgaaacctagtttttttgcttagaaggaaagtaagagctagaggaattattccagtgttctgaaaaggagaggacaaaaaaagtctagagtagattagctttttattgactcacattttctcaagcaatagcttctccaaagttcctaactccttcctgaaaaaacagaggactcaagtaaatacatttcttcctatgtttcatatgaaaaaatgtttatcatgattgatgcatgttgtgaattagacttggagggaaaagcagtcatggcaaaatttattttcatgatgcttaatttgatgaatgttactttattgtttattaccaacttgcacttgcaataggaattctacactttaatatggtctgctcctcaagaatgcctagattctagtctaaattgtttcactagctagttgtgtggctttaagcaagctaagttttagctcagggttttcaactataaaatgtggttgtccatgatagactgtctttaagataacttctaagtagaaagattgtggttctaggaatttaggtctaattcaggataaaatgggaatctatgcaagatttttgagtcctaatatgacgaaagtgcatcttttcagtattattaaataattacattgactttgcaatgattctgggcaattagttaaacttcttactggtaagagctggaaggatagtttcttcacaaaagctggacaatttaatccatctttgagtaacagtatcactgcccccttcagtaaagttttctttttaaagacataattttactcttaactggtaactttacacacccctgctctggatacatctaatgcataaagtaatgtcaacctttatctgggcaagtcctctattcttttagagacaaagccctgacaaggaaataagatccattaggagatattcatgtgacagaaccagagaaaagctctttgtattactacaacaggcaaaggcaactagcagctcaggctgagacatcagatatgtaaatcaggccactgccagattctatcgactgaatcaacccagccgtcatggctgagtcgtgctgacttcccggctcagggattatctgaggacatcttctcaccttctctgcttggcttttgcgctttgtattttatttccatcagtatcakttagagatctwggaaggaggtgaaactcaaatcgaccattttttctccctgacaacttagataaattacttagttgagaggaaaatttgaaatttttgacttaaattgtggtttggattatyggtacattttagctattcatctcatttgttttttctatagctactaataattgaaagctgactgcagaaaatagaataaatttataattctcaatacaatagaagctgttgacagagagaaaaatcaaatccccttatgaaacaatttcatatgagcaatgattttatgttctgagaatattaatgataagatatgtgaggacacaatttgagacttttattactaaaagatttctggttatttctgaggaatctcaaasagaagcttgttttgaggtaaaattatactcgattatctctttatgacgtttattagacaatgggaaaaacagaaacaacttataccatggggttaacaaatatttacttgggggcttttgagaagaacttgaactataaggttttggagtatgttttgatcctaaatttattttacctcaaataagcatgtaataaagttttaacatttgttttactttctgatgtttgagtattatatttctacaggggtaatcctattaaaagctttatgcttatttttcagtacttaatttgaaagagaattaagagcatacaaaattacagaaaaatgaggaagcctaggaaaaataagagtggagaaatctagagacaaaaagagagatgggagttcaaaaagataattacaagtttgagaagtggtcagtaataaataaaatgttttattgcacacacatatgtgggtagcagacagagagaagaaataagtatcacaaaagcaaaacggggaaaaaagtgattatgtaaatggatggatgcatctggsaatacaaagctgaataagattgagtccctgctctactggaattacaatttactggagaagtaacaagatggaaataatataggtaaagaataaatcataagatagaaaataaaaaaattccatgaacagatttaaaaaaatagaatgttttgggaatatggggagtgagaaggagacagaaggggaaatcaggaaactaatagaggagagggcactgaagtgagctttgaggcctggcaggattttgatcagggcagatggcttaagaaagtttccctaatagaaagaaatgtgtgggaggaggaacaagtagggtgtgtttagagaagcgtgattcatccatgtcaactgagacttaggggaactggaacaccatagttctaggttagaaaaattttacttcattcagtaascaagggagaaaatgacaaagccaggaattagtactgtagttttggatgatgattctggaagtggtacttaggaaggagtgagatcagaaggaccagaacctactggtagctgagtgggacttcaagcccacctttgagtgctgcttgagagaattcrgagaagataggagatacttcatttttttggtgggagtggggtgggggagagacagggaggataaaatggagcagataatatttttaaaggtgactttgctgcctctggaaggataaaaaaccctattctggttctcattgctattatgttccaataccacttgccttgatattgcagtaatctttgatgttaagggagtggaattaggtatttatgaatatgacctgggacataaggaatgtatatacatttattygacagctacttatttggtgcccactgtgtgccaagcatgttacacaagagagtaatcataaggaaggtgacactagcctcagtgttaggatggatgggggttggaacagagcttatccttctccctcccatctgttgtggtgagactatggcttacttttactggaggtatcatgtgggtctctctgtatgtcgtcttcccaatgagccagttcaaggattctgacaaccacctttttgatgtttattttgtaacagatgattcaagagagccggtttctcatagaaatggcggacacagtccaggaaaagattgtacagtgtcagaaagcaggtaattgtttttaatttttttttctgttttttttttctattttgtttggaaactataataattcttggtagatttttttttcagaaactttctgcttctcttaaaatgcagttattttatagcaatgcttaactatactttaagttacactttagtctttgtttagtacagaygaaatccaagtgataataggtgggttgtatgtgagygtacagggttggggtggtgtctgaagaagtctagagggatgagggtttctgaatctagttttgtggtttggaaccccatcaaaaccttctactgctggtattgaagctatggttccatacagtcccttaaaacccacttcaattttacaattggaaccaaaatcctattaatcttccaggcttttgccccattactagtcttcactttagatttagatttgttctttctttttaagtatgggatgagtcacatatctgtgagagtgtacttgtttatttctgttcaccttcatccacacccttgtgctttcatctcctggatccacaaccttctctatccacatacccgataatgattatgacgaggaagatgacaatagtagcaactgcttgatacattgcatatgctataccaagcacacacactatcttactcatgacaactctgcaaagtaatcatcattatatccgatttatagatgaggcatctgagatkctgagagactgagtgacttaccctaggtgccatatcaacacgcggtggagctgccctttgaatccagaccaaacttttaaaatggtgcttttcactggctgaccagcaggcttagatatttctgttgacaggaagcacaaaaataataatacctgatacttacatgatgccaggcactgctctgagatctttatatgtactgattgacttaagctttacctctgtcccatgaggtaaacccacttgttaaccacatgtcacccgtgaggaaactgaagaccagagatgtcagggtctttccgagactcacatagctagtaagtggtagagctgggctccacactcatgttctttactatgtgctatgtttgtgatgttagcaccaggaaagttaacgtggtcttaggctgcattaataaaaatataaaaactagaacaaggagaatggtggtagatccctgacctcatgtaggcttctccaagcccattttgagtacagcgttcactcctggaggcaagttcccacagagctcagctccaggaaactgggcaatgcagtggccttgcctggatgccatctttaaagaagagtttcattggcaagctgaatatgtttgaatggttaactgagagaagacttgaagggattttacccaatatctttcttcaaatatctaaaagcttgcactgtagaaaagagtttagacctttttggtctgtgtccagctagcaccaaggagtagaagttccaaggaaggagatttttggcttgatgtcagtcatagctttctgaagatggaatgagctgttcataagagaatatgatttccatctttaaggtgctaagacaaaggctgaagaaatgtgatggtgatggttttcataatcttcaagctcgagcagatggttgagctaaaaatactttaaggtcattcccaaatctgaaatacttgggtgtttcccaaaatgctatttttaaaaaagcctttttatttttagccaacattactgattactcattgttatctatgtgggttccaggacctactattaagcgacagggatggttcataaagaaaaataagacatatgcattcctcacatatggttgccattgacacatcagaccatttcatgcataaaccaggaagaggacaaacaaggtccatgtaacctgttggaataatttgcttcttacttatttacttattaaaattttttttaatttttaatttttgtgggtacataggaggtgtatatatttttggggtacatgagatgttctgatacaagcatgtaatgtgtaacaattatatcatgaaaaatggggtatccatcccctcaagcatttctcttttgtgttacaaacaatccaattatactgttttagttacttttaaatgtacaattaacttattattgattatagtcatcttgttgtgttatcaattactaggtcttattcattcttcctatttttttgtacccatagaatttacttttttccttctcatgtcattttctatggctcctggctgttttaaatacaatttagcctaatgcattgactgttgtcaatttgtgcataaggacagctacttggtgggatgaacagaatgaaaaggataattcartttagggatttggaaattatgagaagacaggaatgtgaaattatattttactgataatattttcattataagatgcccatttttctgagatatatactcagatttcttatgcattctttcttcaaagggatggagttccatgaagaacttcataatttgggggcaaaagaaggcttgaagggaagaaaactcaacaaagcaactgagagctttgcttggaacattacagtattgaaggtagatgaaacactcagatgtcccctgtgcctttacttttcttctcctcatctctccaatgtgtagagaaatgtaaaggattaaatatgatggtttggatttttaaaccttcactttagattcagggttacatgtgcaggtttgttatataggtaaactgtgtgtcgcggggggctggagtgcagattattttgtcacccaagtaataagcacctagtatgcaataggtagttttttgaccctctctctcctcccaccctccatcctcatgtagtccctggtgtctgctgttcctctctttgtgtccatgtggtctcattgtttagttcccacttataagtgagaatatatagtatttggttttctgtttctgcattagtttgcttaggataaagccctccagctccatccatgttgctgcaaaggacatgatcttattcttttttatggctgtgtagtattctgtggtgtatatgtaccacattatctttatccagtccactattgacggacatgtaggttgattccatgctttgctattgtgaatagtgctgtgacaaacagacatgtccatgtgtctttatggtagaaggaattatattcctttgtgtatatacccactaatgggattgctggggtcaaatggtaattctgttttaagttctttgagaaattgtcacactgctttccacatggctgaatgaatttacattcccaccagcattgtataaacattcgcttttctccacaaccttgccagcatgtgttattttctgacttttagctattctgactgtgagatggtatctcactgtggttttgatttggatttctctaaggattagtgatgttgaacacctttttatatgcttgttggccgcgtatatgtcttcttttgaaaagtgtctgttcacgtcctttgyctgctttctaatggggtgtttatttttttgcttgttaagttccttataaattctgaatgttagaccttygttggatgcatagtttgcaaatatcttctcccattctgtaggttgtctgtttgctgtcttgatagtttcttttgctgtgcagaagttctttaattagatcccactgtcaatttttgtttttattgtaattgcttttggtgtctttgtcatgaaatctttattaggtcctatgtccagaatggtatttcctaggttaacttccagagattttatagttttaggttttacatttaagtctttaatccatgttgagtgatttttgtatatggtacaaggaagaggtccaatttcaatcttctgcacatgactagctagttattccagcaccacttattgaatagggagtcctttctctattgcttgttgttgttgactttattgaagctgagatggttgtaggtgtgcagcattatttctgagctctctattctgttccattggtctatatgtctgtttttgtaccaatgccatgctgttttgattactgtagccttgtagtatcgtttgaagttgggtcaagtgatggcttcaggaatgtgtggcttgatctctaggttcatactctaggagatggggagctgcatactggaattaacatggtttttgccttaataaggcaatgaggttttcggtgcaggcagggtacagcccatgtgtgagattaatttgcctgkktgtgtgtgtgtgtgtgtgtgtgtgtgtgtgtgtgtgtttactcacatgaatacttacgttcaagtcaatatggctgttcttgtttgtggaaagaataatgacaaatgcttctggggaagattccaacacaaatgattttgaagagacaaagtacaaaatatctagggccattgaggatttttattttaagaacagttcctataaatacatttctttttgcaaataactttggaagtcattttcttgagattatgatttgctctctgctgcacatgaattttagaattttgaagtaaatatgccactttttatattttcttacatgaaaaaagaaatgatttaggcagacaatatattcttgacagctaaatgggagaaaaatagctacaaacaaaattaataattgctgacatttaaagaacactcattttgtgctaggtactgttttatgaggtttatatgaattaacaatttaatactcacaccaactcagtatcgttattaatctcattttacaggtgagaaaacggaggcattggaagtctgtgtatatttcctgagggcgctcagctagtaaatggtgtaactaaattttaagctcaggcagtctggctccagaccctgtgtctttaacctgtgctgcagagatgctgcacatgtttatgtgaaagtgttaggttagctgtaagacatattacaaatgtctattaaaaattcagtccacaagtgataagcccctactatgcattgggctctgtgctaggcactgggaatacgtggagaacatgagatacagaccctgacctcatgaagttagcagtctgagtccagtggaggagggggatggataaggcatcatttgcttaaggagcagggatgacctagagctgtagtgttaaagaggtgcttattataaccctagattataatgtggcagtgtgtaccctgatataaacattttatgttcagaagattttatatgggcttgttaatgtgcctgtcacagaaaggtgctagggatacaaatatcaggaggattacctgggtctccaagactagtctataaggagagacagacatgtaactaataatggccatcaattgttcagcacttattttgtgatcagcactcaaggctaggtactttatgtacatttcccctttcttccttgccacaacagtgcaatcttgcaacatgacatgctgactctgataggactctctccatctcacaaatgaggaaattgaggcttgtgggggttgaaatttcttgcctggagtcacacagctagtaaayagccagcctgcaatttttaactcacgcccatggttctatccactacactgttctgcctcctctaaaactccatccatgtggctgagtccctgtattagtcttttctcacgctgctaataaagacgtacccgagagtgggtaattaatttataagagaaagaggtttaattgtctcacaattcagcatggctgggagggccacaggaaacttacagtcatggtgcaagaggaagcaaacatgtcctttttcatatggcagcagcaaggagaagtgctgagcaaaaggtggaaaagccctttataaaaccatcagatcttgtgagaactcactcactattatgaaaacagcatgaggataacctcccttatgatttgattacctcccaccaggtccctcctacaacacgtggggattgtgggaacaacaattcaagatgacatttgggtccaaaccatatcagtcccattgggtccaggcagcctagtgcaggaataagaatgcaggccctgtgtgattacctgatagtggtgagactagccaagttatataatctccctcagggtrgtaataatacctacatctcagattttgtgagaattaaatgagataatacatacaaaagatgtaagtcacagtgcacaaaactagacagcatatatgttagctgttatttgtttgtttgccaggtgaggataaacatggagaaatgaggtttttgttatttttatttctttgttaacttctgacttaagcccacttagtgttgtcagagatttcttaatgtttttgtttggtttagtaacagaagctgattgttagatgtgattgagcaaatgctgttcaaattattccaagagagagcttttcagacagaattgattttctattattataactcacatactagctgctggtatttcagcttgagcactagagtagtggactactactaaacaagagtagagaacatttccacacttccaatagctcctttttctcctccattgagtttggggcctgttaatctggtgtcctttccccaagagctggacaaatgacctcctttgaatttgaattattagctgagagaaaaagagcctgggctctgttggagactttttattccagtgrtgctgctctaagaagatatctttttctatacgattcttcctttagttcttatgcattagatctgaaacacttgattcccaattaattctccagacttgctattgattttcagagctcctctaagtattttaataaatgctctttgtttataagtttagtagattcaatttaccttgcttccagttggttgaatgattaataaccatcctggaaagacataatcactgaattaggaggctgtggtacaattctgcgttgcctactgaraaagtttccttatacatgatttagactagtattccctactatctagagagagggagtgggaattaaccaattctggttaaatgtgttggtttgtatttctaaaaatatttaattccagtgtaatttccaataagtaaggaaggagctggaaaaaaatgagaaatgtgccctcagcaagttgggggattgacagcatggagtggtgcaaaggggcattggctttagagtaaattgagctgagactgaaaaataaattgtttagtgttttctgcagttcaatattacatttatctgatattaaaagctggagaaaaaaattgcagaaagaaaaatgactaacgacaatataatgaataagaattataattacagtgtccaaattgttgcagagaccaggacttagtatttagcaaggaaactgaaatcaaggtgcttctggaagatcccacacttgtgtttttctttaattcatattctagcacctacgtgggtccagtatagggacttgtttagcgtatcttttgcatttttccatacttttgccatatgtctatatccaactgtagcagtcaatttgctcttcctttctttctttttcactattgtacatgaaattggtctccttacatagccattgtgtttatttaggatgataggatgattcagtcctcactaccttttcaagacaatcactggatcaaaataactccattccattccaccctcacatgttaaaagacctttccctctgtttcttctccatgatgtccttcttgtgctgatataataaaatacctgagactgggtaatttataaacaacagaaatttatttctcacagttcttggggctgagaaatccaagatcaaggcaggagtggatttagtgtctggtgagagcacagtctcttcttccaagatggtgacttcttgcttcgtctttcagaggggaggaacggtgtctcctcaaatggctgaagggaaagaaaggcaaaagaaggtaaaagggcctagctagttccctccagcccttttacagggcactaatcacctcctaaaggccttacctcttgatattattgcattggggattaagttccaacatgaattttggaagggacacaaacattcaaactatagacatttggttgttaacataatattaaaatctcaaaatggaaatttttcctgttttttaaggctttcagaaagggatactacaacttcacttacgtagccaacatattctagtacattgttagtaattttggaagtgtttcactcatgagagttctgaagatctcttgggagcaagatgtggaattacactatatcactgataaaatgctatttgcaatgaagtggaattcatctaaagtcttgaactctatccagagtgatttgactttttaagtacaaaaagaactgcattgtaaaggtgatcacatctataaaactgaaattagaaagaacccaaggggagcattttagtgagctttcccaatatatatttttctaacttgtcctgttggctattttaagaaactaaattttattactttgtgtttttaaaagttttatgtaaaaatcaattttagcaggctggagaagtatcaagtagagatatataaaaataatattaaagaaatataattaataaatattttattacaaaggaaaaactatgaagtaggtaatcactagagcttaaagagaaataaaagggttaagaagtagctgcccttcttatttattcatgactttcattgattacttgttgaataacaggcaataaataaaaaatgaatataactattacctcttcaatggtcattcctattaaatatgtatttacacttttcctggatagatttccaacttataatttaatgcattccaatgtgtgccatgattctgggctgcttttataaatttatgtttagtatatgtgactattacttttccccataacgyttttgctttttatcactacttaagcctttgctccttctgcttttatctaaaacattttcaatttccgtgggaagagcagagattgaagcttctcacttctccgtgtgtagttatgtttctaacccaggcagattccctcactgaattcccgaatttcaggaccttacagttctggggaatcttgctacaacagaggaaattacatggatgtcagtgtagaaatacgctttcaattagagcctgaaaacacatttgaagtctctgttcattgttgagagacaaaagaaaggaaacagatgatgggctaatgggaaaagaagtatgaggagaggcatccatctctgaaagctgagtgagagtgagaagtgggctacccttcacttactggccatagatatttaaaatcattctatgagatactgtggagagggggctgttagtgtgaatgttcaaaccaggctcttccaacagacatagtgaccatgcctttgggggctgcctgagggtatataaagaaggaacatgcccagtatcatccacattgtctattgagaacttttccagtggtgtctctggcatctgccagctgttgttgctgtagaatctagagaaaggctaggattccttttgagtattcagaaaaaaaagtatatttacaaagtgtagaaacagacctccaaacaacaacaataatgcattaataataaaccatccttaatattgatattattatactatcaattattgagaaacagcaggcaaagtgattaagtgtacagacgctgcagccagacacttcctagctctgtgtctttgggaaaattttgttttgtctctatgctcttgtatcagttggggtatgctgggttgtgctatagtaacaaaaatctgaaaatctactacaatataacacaatggcttatttcttgcttgtactacatgtccatcacaggtaagtaatggtcactcaggaacacaggctaatggggactccatcccagcaaatacttctacaatcccagaggtagggatgcaaaaatggtctttaaaagcttctgcccagtagagtcacatgtcccttccactcacatttgactggtcaaagcaagccacagtcaagtctgatttcatggagtaggacaaatgtaaaccttctcagggaagaggagcagatattggtaaatacaatctaccagtgacaagttcttcaactaccccttataatgtggactaaatgagtaaatatatataaagcagtatctggcacatgctatatgagtgtttgttatttttattattaaaaatgaacattcagtgcttacaataatcaagtgatttttacacaacattttaattacttttaaggataaccctgtaaatttactcttattatacccattttacagataggggaaatgaggctcaggaggttaagaaccttcccattggcatacaggaagtgagtgatggagcaaggatttaactctaaaggccatgttgtcatcccactatgctatattgtcaaaatactgacagcaccataatagtaatggtttgtattaactgagcactttctatgtatcaagtatcctaccaagtgttttatatttattattttacttatctaagggagtgagtgtcctgcccatctagcatgaatatttcaatcaccttgacagaatatgcctactgtcagtagtcagtggttagtgcagaaagctacagcgagagagtgtatcttgagaataatttatttacaacactatatttacaaaacaactctcttttctcaatctggtttcccaggtacacttttctagtggaaaatagaatgaattgaccaagtggtataactagttccatctgcccagtagtcacatttctctttgtaagtaaatcagttaacttccttttttatttgtccatctcctatgagcttggttagcatgaatcagcttcccagggcctgatcacccctgagcgaatggatacagttgagtccttggacaggtacgattgggaatcacggaagcaaagcaaaacaacaacaacaataccaaagcagaagaccagacccaggacccctgagagcccagccagcctcctcttgtttctcttggacagctttgctattcattggcttttagtctggacattgctagctgccatttcttgatgggacagaggaagttcaagagccatgcctctagcaaaaactttacaaaggctatactcctttcatattccttcctcatgccccctcctccacagccacagttctactgttcagrcctacaatctgtcctttatcaactgaggagttacagcagaatctattctgtgtctcctctaggcaacatttacttcttcaattttcattttgttgtaaagtttatttcaatttttttgtctattaaacgtttaaaaataatgttggaattttggcaaacagttacggttaacagtcatgccagaaacatttggtgaacgcaactgggaggggcaaaatagggatgaagccaaaattgagggtcttattccagtggcagccagtttagtctcgctcaacctagtaagccctcaactcacttggaatcttagccagctgctttacaatggatatcattgattaccaggaagaaggtgggtggcagaagggagagaatggatggatcacttctagaaaaacagcttgaatctcatatgtcagtaccattatttttatacacaaaagaaaatattattaagccttataaagtgtagagtatacatttagaaggcatagcatctatctgggggttataaactaagtttgatatatttatcygtggacgaggtatctgaaaagatactcctagacacatttgtagaatcttgttattgtttggctaattagtgcaaaataaagacccttctctcccacctcaagaaggtgatgttatttccacactgacatttataaataaggaagtgcaatgcataaatgaggcttataatccataaattagcaaacaataatttaacaaatttttatttcattttatttttggtgaaaccaaatttattaattcaacaaatgtatctgttacgtctttactaggtgacaggctttgtgcttgggaatgtactggtgaataaaaatgtggccttctggtctcagagctgacagtctagtgggggaagctgtcatttaacaagcacatgatgtgtgttaaatttgtccttatgatgggtgccttaaaaaagtgcatgacactatgagagtgtgcaatgggatttgacctaatgggagaggccagggaagtattccacgaggaaataccagtacagtggtgagtaaatattccagcctttcatggattccaaaaccctgccttgtatcttgatacttgagtgtggttgccaaaacaatttgaaaataatggtgaaaagaaaacacatcaaaataaagatgtgccggacctcttcaacatggtctggggagttctaaaatttctgccttgctcatttaattaccactcattagcattatggctaatttgttattatatcaaatctggccatattaattacaaattaatttaatcatccaccttctaaaatataatctgcagcgaagttttataaccatgtgtatccataaaattcatttaatagcttatagttrcagaggaggatgttataaggttggtttctgagaaatttctacaatttaaagctgaaaagatgcagagagagagagagagttatataatatagaatattagtattagtgttagatatatgggtaaattttttgaagtataattgatgcatctataatttaaaaaaagccacaagtttaaaacattatttcaaacagctcttatccaacaatataggacagtttaaatagaatgttaatgcttcttagcaataggcagactggttacatggtgtccagatttctgccttgggtggctgcatcccagctgtgctgcccaggagtttagtagagataaaagccgggctgttgacatgattatggaagcacacaccactttatctccagtagaactaaatttagcatctcttggaggtacacttttttttttcagatgaaagctgcattttataatgaatctgaataattcaaaagtggcaggatcctaatgaatagatgcatcatagaccagaggacttggctccaacttgtgaagttattgaaggtcttacttttctttcaggaaaattttccttagagaaaatttgtttcttacacacagagttttagcctaaggtgagttgtagcttaagtgagtttgatgtcttaactctgcattaagtatttcttacagtgatataagtggaaagaaaacattgataaccaaattgtttcattctggttccttacagcycttgtaggttttatactcacaagctccttttctgatattgttactcaaggaagacaaaaatgggctacatctatctaatttccttattgttaatccaaatcagagcaaaatgagttcacttctctgaatgtgtgtgtgtgtgtgcatatatatatctatatatacatatacatatatacacacatatatggtatgcacacagacattgtcaaataaagtcaaatctgaatttagatagagaatctgttcaaaagaattatcacaataaggagaggggactactgtgataggggaactattgtaatggggagaatgctcctaccttaagatctgtaagcatttgaaaggccaggcagaaaggatttttcttttatagggaagggcacagaaggtcagaaagaagcacatatgagggagtgggtagcgtgatcccacagttgatcctacagtgaggaaacatctttcctgtggtcagtcctttcttggtaagaggcgattaaggagaggctgtgtgctgtctcaggatgagagtgggtcaaagttccagggcctaaggggaagagagaagcctaattaaagtttggccaagtccaggtagtaggtatcaatattttctccagattggttagtggacacaaacagamaaacagttcagctagtcatttatgaggcaagaaagggaatttgaaaggtctgtgtctggccatgtcacagataaacaagggagattccatgagtcttagccaagtcctatggggaagaggggttctttgcagtaagtaaggtcttttgaggaacacaaaaggatgaggggatttcttaaccatccctgatttcctggaacacagggctcagataaagttgagcrttgtcaacatatgcatttatatattgtattatgctgctaataaagatatacctgagactggttactttataaaagaaagaggtttaatggactcacagttccacatggctggggtagcctcacaatcatggcagaagacggaagaagagcaaaggaatgtgttacatggtggcaggcaagagagcttgtgcagtggaactccatttataaaaccatcaggtctcgtgagacttattcactaccactagaacagtatgggggaaaccacccccatgattcaattatttctgtttggccccgcccttgacacgtggggattattacaattcaaggtgagatttgagcgaggacacagccaagccatatctcatatataaaaaatttttatgaaatataaaattattaaatatataaaatatatacatataatatataaaaatatacttattaaatatataaaaatagatacatataaatatataaatatacatgtatatataaaatgttatgtgtgtatatatgtatatgtgtacatacaaatatgtaaatgtaaaaatctaaagaataatttaggttaagcataatgaaattagatgctacttttttaaagtcatattgaaaagatcgtgattatggagcagcaaaaaagttaccctggagtcataagtggttattttccagtttaattaaacatttcttatttcaagtagatacaatgtgctcaaagatacatcaaatatgagattacatactcatagtaataggccaggaggataaatctttttttctccttatttcccactttttgtaaaatgattttgtactattaattactctccatacattattgatacttttagtatttgtggtaagtgaagatacctatctatgaatgcaggataattaataactgaattttccctttaaggaaaaactcatggccttatgagattaattatagattctttgaaaaacgtatgcccttggagttttaaaaatatgcttaaattcataaaaatttacacataactcttcagataactacttgaataagacaagaaatacggatcattataataattttattaatgctttgaaaaaaggtaacttccagaaagaaaagactctcacagaaccatgacttagaattaagtattagacttttgcatcattgcataatattatggaaaggttaacaagtcgttatgtagaagctccagggtttcagagacaaagaagagaatccttccctatgcagtgaaatacactaacccctcatgatgggatttgtaaatctgccaggacgaagctatgtgttctaaaaatagctaaagtctttgagtgtttatttaaaagataactattctcaatggatttttgagtcagttatactgagggatggaaagttcttaaattgctttacaatgtattccagggaaaaaatattgcaattcaaatctctcagagggattccttaatcaactagaatattctggatctcccagttgtcagctactcagcagctggccttatgaaaaaaactagaataaaactggttcatgaatgtgttgcctgggaattttccttttcttgggtcaaaaaacattcctgatcaattacaaataaatctagtctcagaaagttgagctccttttcttaagcatgtgttaagagacatatttttcatatacatttaaaatatactggatgccctgaaaatatgacttgggtttcagcaacaaattctgatttccttgggtcagaaatatgggtctctatcagtcattttctgttttttttttctttttttttttcagattcaattgggcttcacttttttgtaagcaaagatatatagaaagggaaggttgaatgtgttagaattactcatgttctctggtggtacattattgtaacagaagtttattcctccaaactgcttggatgggcasaatttgaacatatgctgaaacagtcctatagacacttgagagttccatacagtttatttgctggtgaaatcatggatggttacacaccgcttcctcattcccttaccttccagatggctctccacacttaccacacatgttgcaggaaacaggttcttgtttatcgtgggtttgctatcaaccaagaaactgatatctaagactgctaaaaaacaaagctagcgtataaagtcttgtataggaaaagtatgttttagaggtaactatgtcctagtattaaatctgagtaggtgagactgaagcttcttaacaatgtatattgtgtatcctctgagtcagcccatagagtctttacatgtactctgaaactagagagggaaaaagccagcaacttcyttcytgttctcctttatcaatagtacattttagcctgggagaggaagaataccatcaaaaggaacaattatatgtatgcatagtgtgtgcttgtatatgtgttatatcataggctcgtttcttatattaaacaactcacttattaaaccctgcttattgtaagctctgtaataatacatgtagatatgataataacaataatagaggaatgaaattttccttggaggctttggttaactaaatgtattctcagctgttcttatgaaaaacataaaaatgtgtaagcaatataataattacaaatgccatcaagatggaaattacaattttaaattctgaaaaatatagtctttgctactgaatcacagttttatcaaccatactaaatcattcggtcatcctctacttaataaccaccaccttaaaaattgctgggttcatctcaggaagcataattttgttctagagattcttctctggtcagaaagagagagagggagaggagagagagaaaggagcaaataataaagtgactactactgtccttcctctttaaataacagctcctgggaaggtcagatcctttggctgttttgtcaaagatactcaggaaaagttttcatagagatctctgaactacaggagacttgaaaattaattacatgaaactttatgaattttcattgaagttaaacatcagcacaaccagtattattttcctggagcttttgattagacatttctataccagtttgtctgtcatttcttttttgcagcataaggtttaacagtctaatccctgaattggccagagctgctgcatactcctatgtcaattgtgcactgcacaaccgtagggggtgccattcccactgaatgcatgtgagtagtgtcctctggatttgtcatgtagttaccatgaagttgtcagtctaagcatttttctgtctctaaccttttgttctccatgaagttttgagtgcctttaactattattacattaattataattattgtctaatgtagtgattttccctactaaggtttacatttaggataaatcttcagtcatttcaaaaggattcatatacagtagtgtgtcttcatgtgaaactattgttatttgtgtattgaagcacagtagagaagcccaagaatccagagtattacatacatcagatgaggaaaatgtcaattgtaactcagctagatcttaactttgattggttttgacaaccaaacatagttgattcagtttgtaacttgacaacagaaactgtaggcatttggaaaataatatcaagtcctcttttcaaatctaatacatccttcttgtgtaagaaaatttaattaaattcatttaatcttctgaaaaaaatgctctaaattcatttaagagagttaaaaataaataaatcttttaaaaagcctaagacttgagtgagagaaatgatttgatgttagtctgttagcttcaagaaaaaatgccaagttcttgacctggatagaaggtcctctgtgatgggggctttgcttacctccgtgtcttcacattttatattctccaggccctcagttctgtttcttggaaatatcaggcagttttgggattccatgccttcgcactgctgttcctgccaactgtgatgttctttccctcctcagtcacccaccagctcctcttcatcactcacatccagcactagtgttatccattgcctttccagggaagccttccctgctcttgtccctccatacccctcaccctccaattctcatcaaaaccaaattatctcctgtatagtgccagatctgtagcttatacacaattttattcccatgctcaccaccctgactcactaaatgttaatgatgtgtccctatgtctttttctcatacaaaatcctgctccttcagggtggggactgtgttttagtacagtgctgagatttaggagaaagcagaggattacagaagctctgcaagttgttcaagatgatgcgactaactagtaagccgtggggatggatgcacaccttgatctatgtgacaccaaaacctgtccttaatatccacagtcatgatgtccaaggtcactgtagatgcctgtgtaccaaagcttgttcttcatattgggcgttgtgtccaacgtcaccattggatgcctatgtgtcatttgggaagatgggcgtttctgcagttcttggcagctccgttttctcatggggttgaaattttgtcctgtttttcttacttcaacctctggggagtttcatttttcctggtctactcttaaaaaaaataatttttgtgggtacataggtgtatatatttgtggggtacataagatgttttggtacagacatgcaatgcataataatcacatcatggaaaattggttatccatcccctcaaggatctatcctttgtgttttaaataaaccaattatactcttttagttatttttaaatatacaattaaattattattgactatagtcactctgttgtgctatcaaatgcttggtcttattcattctaacttctttttgtacccattaaccatcctcatctcccctcattccccactacccttcccagcctctagtaaccatccttctactctctatgtccatgagttcaattattttaatttttagctcccacaaataacttagaacatgtaaagtttgtttttctgtgcctggcttatttaagttaacacaatgacctccagttccatccatgttgttgcaaatgacaggatctcaatcttttttatggctgaatagtactccatatgtactatcacattttctttatccattcatctgctgatggacacttaggttgcttccaaatcttggctattatgaatagtgctgcaataaacctgagagtgcaggtaactctttgatatactgatttcctttcttttgaatatatacccagaagtgggattgctggattgtatggtagctctattttcagttttttgaggaagctccaaattgttctccatagtggctgtactaatttacattcctgccaacagtgtatgagggttcccttttctccatatcttmgccagcattttttattgcctgtcttttggatataagtcattttaactggggtgagatgatatctcattgtagttttgttttgcatttctctgatgatcagtgttgttgaatacctttccatatgcctgtttgccatttgtcttcttttgagaaatgtcttttcagatcttttgcccagtttttaatcagattattagagtttttcctacagaattgtttgagctccttatgtattccgattattaatcccttgtcagataggtagtttgcaaatattttcttccattctatagtttgtctcttcacttttgggttgttgcctttgctgtgcagraactttttaacttgatgtgatttcagttgtccagttttgctttggtttcttgtgcttgtggggtattacttaagacacatttccccagacaaatgttctggagagtttccccaatgttttcttgtagtagtttcatagtttgagggcttatatttaattcattttgatttgatttttgtaaatggtgagagatagggatctagtttcattcttttgaatatggacatccagttttcccagcaccattattgaagagactgtctcttccccattgtatgttcgtggcacctttgtcgaaaatgagtttactgtaggtgtgtagatttgtttctgggttctctattctgttccattggtcgatatgtctgtttttatgccagcaccatccagttttggttattacagctctgtcttataatttgaagaacctggcctactcttttactcagtttcatcttttcctaccagagtattccatcttttcagaatacaggcaggctcccatatgcactggactggcaatttgcttttggctttttctctcaataggaccagtgcccatctttatttttctcctccttctggtggccatcttttgactatcaggcaactggtgactgttctcagggttatttgatataattgcacaggtttctagatcagtgcttcagctccttcaagccatttccctcaattcatgctgtgtacaggcatccatatacatatgtacacagatatcctgagtatacattatatacaatttttagtggccctattctacattctactcttctagtgcccatgtttgattttttgttgttactctagaagaagcacacaaaatgtgctcaagatgtgaactgaattatatgaatttaaatctgtgaaaatattaacaattatcccagtgcaagaagacattggtcactattgcctttggttgctcataagaggataaaaaaaaagacactttaactccctttaggtttattgtctttttctagcatggttcagatattaacaatcaaagtgactgaactttagattttttatatgatcttttcttaaaatctgggtaacttttatctttgagtttcttccttcctttgtgaatcatcaccatcttcatcactgccaatctttaagtatttaccaagaactcatcatatatctagtgccataaatatatgaaaatgcttttagaaaatgctctcctccccggtattcacttatgctccaaattggcaaaccctttggtctcagttacacttttggaataatcctctcatcttgagatcatcattatttctattcaataaactagagaattattgtaaaacaaattgggtataccagaaagaagtgggacattttagagaaaatcagaatattcaccataaagctggaattaagcatatgactgattggaactgaatttkttccagttttaaaatatatttttaaaatgtaaaatacacttaacaacaaataatcacttatagttataaaatatgtattctctctagacagtgttctaagtgttttgtacttattaaatcagtaaattctaatagcaattatgtgatatatgtacacactattatgatatccattttctacaggagaaaaccaagggacagaaaggttagctaatagctaatgagtggcagtgccatgattgaaacccaggcagtgtggacccgcagtccttgtccacagtctgacaagactgccccacctggtccatagctgtttcatatacaatgaatgaaaaagctcaataacaatggtaaatccacacttcataataacaattaaactcctgaacttgtaaatatataaaagcagagagatagatgctcatcttcagtggggagggaagggtttgttattcatgttacaataggmaaactatccctcaattttaaatacagaggattctagtgtggttggctgtagataacaagtccacttgcaacagagattggaacattaggaggggttgactgttatggacttgatggtgtccccttcacaaatttctatgttgaaatcctaaacccccagtatctcaggatatggctgtatttggagatagggcctttaaagaggtaactaaattaaaatgaggtaattggtggggcgggggataatccaatatgatgggtgtcattataagaagacaaaatttagacttagacaggtacagaaggaagaccatgtgaagacatagggaaaagatggccatctatataagccaagcagtgaggtctcagaagaaaccaaccctgccaacaccttgatatgggacttttagcttctagaattgtcagaaataaatttctgttgcttaagctacagagcaaacctcgctccgtaacctgttaggaaccagaccatgcagcaatgagcattgctgcctgagccccgcctcctgtcagatcagcagcagcattagattctcataggaatgggaaaccaattgtgaactgtgcatgtgaggaatctaggttgtttgctccttatgagaacctaactaatgcctgaggatctgaggtggaacagtttcatcctgaaactatgcacccctctccagccccccagtccatggaaaaattgtattccatgaaaccagtacctggtgccaaaaaggttggggaccctggcttaagccaccctgtctgtggtgctttgtcatggcagccctagcagactaatacagggacctaggaggagaaagctaacgtttgagtttcctagtgcaaaactcatcaggacacaaacttaaaactccacaattttctcttgatctttggcagaaaaatgtaatttaattaggatgcatttttatgtaaagtggggtgcccttggccacatgacttgttctttatgtgggcagataggacagtctccttaaccagcgtgattagaatttcactagcttatcgctcaacaaatacacacattgttactccactggcttctgcctttcccagatatacctgtcataatataatgtaattaaaataattataattgtctgaccttgaaattactaattagcatgatggtcagtcctttgataattttctccagaaaagtcttgttaaaatgggcctgcataaaaagctgggggcaatgaactagttataaaaggataggctaatttttggttaagttgactattccttgccagaattaagaagttggaagatgaggtttcttgggggtggttagtcatagtcctgggaaattgggacctaggctgaggggagtaggaattcagtggcactcaattaattttttcattcaaaaaacacaaacaaagcctttgattcaacaaacacaaacaaaatcttgctttggccgggccctgtgctaactcctgggatgcctctatgaacatgatagaagcagctactgcattcagagtttatgttcttatgggagatacagatgttacaaagtacaagccataattagttattttggcttgtactttgtagagaatgaaaaataattttatttaattcattatcttgctgaaggttggcactttttagcccgtgctgtccaatgcagaaagcactagccataggtgtgctattttaagtaatacaaaataattacaattgaataaaattagatattccattcctcaggggcattcgtcacatttcaagtgctcagtagccacatgtggctagtgactaccataatggacaacagagatacagaatgtttctgcactgctgaaagtttcaccagagaatgctatctgggctctagagttgtgccagacctgcaaagtcaagaaagagggcccttagcttaattccttagagaacagaagatatatatatttatatctaccaaaatagtccacttttggctgcaggccatagtataaatctcatcttagtctggccttcaaaatgaagaatgggctggttttaaaccaaggacagatttcctttcctcttagtcttatgagtattggggttttgcattttgtgagtgctcatttttgtatgtatgagcaatttgtccataggaactaggggatttttatattttttccttttatttaaaatatatgactacataaaataaacaacatgtggtttacagatatgaggagtattggaatctgttactttaaaatagtatagcaatgtttggacttttcacagctgaaagaattaaattcagcttcagtaccaccaattcccattttttttcaagtacaagagaaaaaagaagaaaagaatatgtgggtggagaataaggaaatcagctgtgttggtttaatacccttgaaggtgacattagtagaagactttattaaaacatgcaacctgaagctgaggattataaaatataatatgtcatggtgggagatatgctttggctgccacacctaaaggtcactctttgaagggagctgagacagctgccaggatccattgatttctttctagtactaaaacatcctctggcaggtgtcagcctgggtgtgtgaacaaaaaaatatggaaaattaaagagtaagcaaaaatgggccatgggatcctcctagtagaccgagcagaatgctccagtgtttgttctgaacagacgtgtaaatttttgctttagcgacacaacagatacatgaagtgttcaaatattagtcaacatatattttctttagtggaatatagcttctcaagtctctaggataacaaagttttaaaatcctgtctaggtgtatataattctttaatttgtttctagtggggctactccctcaggttaagtaggacactttccctacaatagatttcatttttctttgattagtttccacttactccttctgctcctaacatggccatccctctgcagttctccaaatatcccatgtgtgtgcttgcctctatgtctctgcatacaccatttctcttctgtgcttaccccccaactcctctacaatctagaagactcagccttgagatctttttgaacaagaattgcatttatgatgataaatctgtgcctgtcctacaaaaaaagcccttgtctccttctgaggtgattttgcttagtggctaatcttttcaactttttgtctttaggttttgcagaaaatgagaaaagatggaaagagtgagaggtcacatgatttgctgcctgggctgtggggaccacccaggggctgtgtggagggaaccatccctacgttagcgctgagctcataaccatgacstcaacctagattccaaatctaggtgctcacattcatttcacaccattagcaagttaaaaatgatagagccaggccaagcgcggtggctcattcctgtaatcccagcactttgggaggttgaagtgggcagatcccttgagctcaggagttccagtccagcctgggtaacctggtgagaccccagctctacaaaaaatacaaaaattagctgggcatggyggcacatatctatagtctcagcttcttgggaggctgaggagagagtcgcttgagtcttggagggtgaggctgcagtgagacatgattgcacctctgcacatcggcctgtgtgacagagtgagaccctgtctcaaacaacaacaacaagatagagccatttactaagcagattggcaggtgagggacgctggttttagctagtacagtgaatgagtgtgtgagtgtgtgtgtgtgtgtgtgkgkgggkggtgtattcttagtcccttttacactgacagttgaaaaactgacctttgcccttctctctcccatgttatttctgatgttagtaggcagtttgtagcacagcaggatggaagagttgcaaagggaattgtctatggggtgaaccttttcaattgcccttccatccacataccctctttactgtgaataatcataaatgcataatgataacattttccacatgctaaatcatgctaatgacccctaccaagtagaggaaagaatgttgtcttataataccaacagattatttaaacytgagagctttacatcatgttagattaagttgtgtatattaaaattttccaaacagtaagtataaagatactgtcttatacatataagaggtatggctattttaacatattttttaaattatatgaaataaactttattggacatagttttacgttaccattttttctctctttcaccaaattgtgaaagcaaatagctagatatrctttctccctttgaagaggcatgacagtttcaggttttgctaagaaagatagtttccatctgaaaatgtgtgtacatagtgtttacttctaatttaaatgcctatttacacaggttggggatacaccaatgttttttgatgatgtggtaagttttcaaaatctatttgaggtcatttttatatgcttagaatgacttaggtgcaaatctacatggaagcagaggaataaaccacatggttttagaagccatttctgatcattggagcacaagctttttgtggacagcaggcactccctacctaagtccaaagcaggggagccacctgctggacagtgtgaaaaatcttcattttctggaggtagtcatccctgcttttttacttttaartttaggtagatttacttacatataaatttatgtactttttattttgctgagtaaatttctcacttcacacaaataaagcggctctaaaataaggagaaaaaaattaggatgctatgaaacacaaatttgaacaacgatcagtactagaagtagaggcttttagtcattccattttgtattttgtctttttcctttcattcgtagttcagcctaactgcatttatattgtaaaccaaaaataaaattctaagccccttaaccgactgaatggacctgtcctatggggacaaggggattccaaaaaattccaaaaagctagttcaggccatgatgggaacctgatggtgtaaccacccagttgggttcacctttcatgctacctagaaagagctgattcatctagacaggggaatcgcaatagagaaagaataattcgcacagagccagctgtgcgggaatctggagttttattattgctccaatctgtctccccaggatcagagtttttaaagacaatttgtgggaggggaggggcagtgagtcagggactgctgattggctgggtcggagatgaaattatggagaggaaatcatggggcgttactgtcttcttgcgcttagtccgttcctgggtgggcatcacaggatcagatgggccaatttcttgatatggtggtgccagttgatccgtcaagtgcagggtctgcaaaacttctcaagtactgatcttaggagcagtttagggagggtcagaatcttgtagcctccagctgcatgactcctaaaccataatttctaatcttgtggctactgttagtagtcaagaaggaggtttattttaggaaagggatgttattgttcttgttttaaaccataaactataagttcttcccaaagttagttcagcctatgcccagcttggaggttagaggcaagatggagtcatttaagttggatctctttcactgtctcagtcataattttgcaaaggcagtttcaatggtaaaagggaattggatacgctgcattatactttcctccctttggaattcaggctgaactgatcggccttaaaattaaaacagagatcttaagacacagtaggctctttgtagcaataagataccaaattccaacctgactccagtatagcatcacatgacagatagcaggccctgagaaaaatcaagtattttaccccaaaatatatttctttgacatatttttaaatggccctgcaaagctatctcttgtgggggaaatttacctcctttagagaagccccttccctttccaggtctttttctgatcctgaagagtttagctgagagtctggtaccttttaaaggtatgaataggaagcatttgccatctattgcctctaaggatggccacctataagacttcatctacataataagaccgttggtctccaacaacaccccttatctttgcccagacactcctttctattgattccaggttttttagataataacttaaacccttcaaccaattgccaatcagaaaaatctttgaatccacctatgacctgtaagtctcctgcttcgagttgttctgcctttccctaccaaaccatgattgatgtcttatgtcctcctaaaatttaaaatatcaaactgtaacccaacctccttggccacatgttctcaggacctcctgaggctgtgtcacaggtcatggtcctcacatttggctcagaataaatctcttcaaatattttacagaatttggcttgcttttttcatcaacaatatgtatacaaacgggcttttctaaaggactttcagccctccttcagctcatctccttcctctttctatctcctcgcctacatagtcaaacttcttaacagggttgtttatacttgccgaatccacttccttacctcccactcacttcttagccaactttaatctttcttcttccccgacactccattaaatcattctcaccaaggtcaccaataaccaccttgtcacaaaatctcatggacacttttccagtttttatcttttttgactagttgggaacattctacgtggctaagcactccctactttttattttttttaatttttttgagacagggtcttgctctgtcacccaggctggactgtggtggcatgatcatggctcactgcagcctcaacctgctgggctcaagcaatcctcctgcttcagcctcccaagtagctgggactacatgcacatgccaccacaccctgctaattttatgttttgtagagatagaatattgtgatrtttcccaggctgactccccacttcttgcaacactgcttctcttgatttctgggacaccacccccttctctcttcttcctacatctctgactctttcttcccagaatcgtttgcaggttccctttcctctgctattctgttaaatgctggtatttcttagggttctagcttaggctatcttctcactccaccttctgtccctgggggacacagttcatgcaaagggttttgattatcttcaccatgctgtcaaatctcaagtgtgtatttttggcccaggtgtcactctctttatctcttgatgatccctgctcatcctcccatatagtttatatatcaaattacctcccaggcattgtacctgggaggtcactcagccacagcaaggtcggcatgtctccagctgtgcttatccctatccatatgtcctgcttatcctcagtgacacctctggaattcctgcttgaatgaataaatgacaactcagagttatccaaacctaaatcctgggggttatccttgatccttttcttaactctccacctctaattggttagcaagcaccgttgggtcaacctccttaatacctccctaggaaacttccattcccatagccgtcaccttagttatcttcatttatcacctgagttagtgaaaagtcatttctcctctatccttttcccactccatagcatagagctggagtgatctttttgaatgtaaagctggtcatggccattctcccttcctaaagcccttccagggcttcccacagctccttcttaacttctcttctgaaactcattgtggcctgtcttctcagctcccctccttcccctccagcttcgtctctcattgccttcttcttccatgcactactccagccacatggaactttctccacttcctcagtggcaccagggatgctttcatgctgagtagtcacatggactgtcccttcttccttgaaagtgtgtaaccctgcttgtacccctgctccctgggagcccccatcctgttgttttcacactgcatggggcactgttatctgtacttcaggtgtttgctcaggtacggagtcttcaggatgccttcatggacacctcaccttctcctgcctcccatcttcaacagagttaggtatccctgtacgtattcccacagaactctgctattccactatcatagcactttaattgcttttttatctttcacgagacagtctctattattgtaagcaattaggtgatgaattttaacatagcaattttaacctgagccccaattaataaacmgtagacatttagcatatgaggtcaaatcaaagaacgtctcgtcaaatccccatgttttggagaaaaggaaactgctgcccacaggagttagggacatttccaaagtcacaaagtcaattcataacttattaatcattcttcccactgcagacatcagccataacccctattctttctatccttttgactgattctggttttctctgcaagaagcttgaaagccttagccaggacatggtttaaactctattttgccttggttatcaagcaatcaaatggtgtggttaaaattgtagcaagcctgtcatttctcatttaaaataaaacgggactcattcaggcttcttgaagtgagactgcatgtgacgatgcagggaacacatctcctagaaagaagaggagccactgaatgggcagcctcatggaatctcaggmtagaagayccttcacatttgaagcaggctttagaggactgtgttatcttttccttttccatttcccctttccttgccttaagagcaagaattgtagattttcactctagtgctgtgggcttacaggggctcagctctgctggtcttttattcctctctatattttctagcacttcattctgttcacaaccaactaagactcttagaatttttcagtttcagtctcagaaagagttaatccaattggtttgtctaattgctgtcattactgcctggcatcaggacatctcataggtcactggtcagctactgattggccacacttgggctgtggtgaatccttggtccaaccagttttggctgtggtggttggttcttaccttttagagcagrgccattccaactcaaggtcagcgtggggctgttttctttaccagaggtctgtggacatggacagcattgcataaggcctgacaaacttctggattctctacatggtgatagtttaaagtttctttaaaaatgtgtttttttgggggggggagtccacatattcaaagttctaagaaatctcaactactgacatattaaggaattgaatatgaatgtcctctcccactagatactgatagtttgattttcacagtaagatattctgggaagaaatctggataggaaggattagggaggccttatcatgacactcacaaagttgaatgggtttggtgaatgtatggtgaattttttccaggcatatatacttacaaagttgatttaaaaataagaatgtagattctggatattagccctttgtcagatgagtaggttgcgaaaattttctcccatgttgtaggttgcctgttcactctgatggtagtttcttttgctgtgcagaagctctttagtttaattagaccccatttgtcaattttggcttttgttgccattgcttttggtgttttggacatgaagtccttgcccatgcctatgtcctgaatggtaatgcctaggttttcttctagggtttttatggttttaggtctaacgtttaaatctttaatccatcttgaattgatttttgtataaggtgtaaggaagggatccagtttcagctttctacatatggctagccagttttcccagcaccatttgttaaatagggaatcctttccccattgcttgtttttctcagatttgtcaacccaaatgtccaacaatgatagactggattaagaaaatgtggcacatatacaccatggaatactatgcagccataaaaaatgatgagttcatatcctttgtagggacatggatgaaattggaaatcatcattctcagtaaactatcacaagaacaaaaaaccaaacaccgcatattctcactcataggtgggaattgaacaatgagatcacatggacacatgaaggggaataccacactctggggactgtggtggggtggggggaggggggagggatagcattaggagatatacctaaggctagatgacgagttagtgggtgcagcgcaccagcatggcacatgtatacatatgtaactaacctgcacaatgtgcacatgtaccctaaaacttaaagtataataaaaaaaaaaaacttccaagtaaaagaaatctaaaaaaaaaaaaaaaataagaatgtaagagtgatggtatttgacatttagaagaaatgttttgacaagtgcatgtgatgatttaatggtgcatattccataaagtcaacaggagtgaagctgtggaaatgtttgtctttctgagtgagtggtatttactgctgtgaatttgctgttccatttcccaatacactctccctcactcatgcttttactctaacttcacgtaactgagttgctattttcaatgatgctagtaattaatgtgtgtttggattctggatttttaaaaaagtaataagatgttttgggacaactggggaaatttaatatgtactgtatatcagatgcaattcctgagtgaatgttaatttctttggggttaataagagtattgtagttatacagaatgtcctcattttcatggtctgcacactgaggtatttagggtgaagtatacattgttggatagatggggataggtaagttgatcaagccaacacgacacaatctgaaaaattgggaaatatggatgctactcattcaacttttgtgtagggttgaaaaatctttaaataatataaaaagttggaggaaaaagtgtaactagtagtctgttggtgtagatggcttgagtctgagatctgaaattggagccagtctcagattagagaaaataggtcttgactttccttgcagtaacattaatctggtgtttaaatgaatgctttgctgaatctggggcaccgagagtgaatatctcattaatgaccaaatctccaaaccagtcatkrtggaggaagctgagttggccacatccttgatttaactaagaagtagcatgttttattttatagctgccttagcctcattcattaaaacctgactcattgggcggagggtggaagaagttgcccctttagaaatatcttgctaataactctktggccacttcagctaacacagaacctggaactcatgccagcatagaagggtggctacaaggctatgggatgggccagccgtacacatgccatgattcactctcaaagaggacaatttcagcctctttaaaagcattatgatttagcagagaataaagaataaatgtccttggtaaaaggacatatctagaccagatgtagtacaactgtcattggctgtagggaatgccatgcacgtagaaggcagggtgaattgtgcccttggaattgtgtaacacgggacagatgtcatgaaaaacaatttacttgctgaaatccagcactgtggaggtggtgaagcagctgaagccatttttgtgatcagttcactctatggtatactgttgttattgtatttgcacttttgttctggcatgtttgcagaattactttttggacggatcaagtaaccaataatttgagcaacaatttaacagtaactttttagagtgaaaccttaccaaccaaataccagaatgtatttaaaaaatattttgctaatatttgtaactatcttgatagcctttgctctggggtttgggccatcctctgtctctcaagctgttataaatgatattttttgaaatgggaatagcatgagttggtcaggtagagatttctatagaagctccttctgtattcggcttatgacactcatggcggtagtatgaattcagatctcagggtcatttattatccatggaaagttaatttgagatgttggaacttttaaacagtgtttgtttattgtgctaatcacgatctgttactaaatttcatttgaaatgcaattaattaccttcatcaccttgctaaagattgacattaatattctgtcctatcctattagttctgttgacacagagggagatgatcacaataatgggaaggaaagagcagagagcaagggaataaacaagcagtgactgctattattttattgaatggttcttttgtcaaaatgactgcaagaaaattcttagaataccagtatcatcacacaaacctaaattcataaggcttcctgcagttgaatcatatttttaaagtttagcttggggttttctattattcagctcactggtgttgaagcaattttgttgacattttctgtaagtggattaggcttgcagtcatttgcccaaagcagacagatggcttcttaaacagagcacccccgtaggaacctatcttatggtatcttcagaaataaaacaggtctgtcacaaaagataatgtttggcattaatttcttttagtgacaaatgatttcagctcatttttactttctctgctggcttaaatgaaacagctgttttacattttttattccaatagtgagcaacgctttggtgtttgacactgaacaatgttgtagcctctaaattatgagtaagaaaataagcttttgagaggggaggatgatgccttttgggatcccccaaggaaagttgccacattaatgcaattgtcatttttattttaaacatggggtctttttttggactaatgagtaatgcaatcctggcttttattgtcgcattttattctctccactttgtcaacttgtctttttaagtttcaagatgtttttgtttcctcacatttttatgaggcaaaggacagtggacttatctacaacattgttatttctgtttatataatagaataataattgctaacgatcattagagttttycatgtatggcaggcattgttctaaagaatttakaggtattatctctcttaatctcacaaaaaatctatgaggtgagtacaattattatagccattttatggatgaggaaactgaggcacccagtgatcttgcccaaggtcaaaaagctagtaagtcttggagccaggatttgagcccaggtacagtaagagtggagcttatgctgtaaattcacttataagaatggcaatatggttacgattcaaagtctctagtctagagactagagactagtctagattgttattctaagagagaaatgaggaatccttagaatcagatttattccttcatcactcctggggttccactcgtcagctagtgtgttctgccatcttgggcagccagcttatgtggaaggcttgtgggggctcatgggtgctgcaaggagaaatcagtacaggggccctgagaattgactgatgaggcctcacattagtagcatccttcaaaacgttcagtggatgcctgtcatgaatatgattcattaataatcttctttttggatctgagccatcagggcttatgacgatacctttgaagtgaaaaccagtccttttttccagcacttatcccactcatgaatcctctatcattgcttttgtatttcagttttccgaaaatctggctcagattaaaattattaaatgcttccaaaccctgtacccacactgaagacaaaagttagaaatcaaaatatcagcacaaggatagtatttatgtctgggacatttgtgaagttctatcaagaaattcttttataaaccaaagaagtcttaagctagtttttcttttctatttgatcaaatagatctatttgatgacatgtgcaccatatcatgtaatgtacctaaattaaataaaaaaacacaaaaaaacaaataaacaatatagagattaagaaaaacaactcttggcctgggaagccggcattattcatttccttcacacttatttctcgtgtgaacctgggcaatgtatttttttagctttcctgtgtccatttattcacctgaaggttataaaaggagtccttcgaatggctcgaaaatttgaaataattactaagaacggttatttagcagatctcagtgatactgtcactaaatgacactttattgttttccactttcagtgtttctttcagtataaatgtcaatgaaacaaaataaatcctaaatagagaaaacgtaaggaaaaatggaatgtattaggcaatttggtgctgtgccataaaggcggtaaccttccagaacactctcccataccatgtatatctgtatctgtaagactggaggaggattcttgcctctcctccaggcaagcataaaaaaatccttgtactgtgtttcactgatcataagatgccaagaaataaatgaagatgcctgctcatcttgcaaatcattgctttcttgttactttttatggggaggcttgtctaatctcctagtcctcacagcaatacattcttttccctcaagtacttagcataatttaaggttagatataactttatttttgtggttattttatatatacctgtatcccacactagacttaggttccgtaggggcagggatgatgtctgtgctcacttttgtaacccccagagtccagcctggtgattctcaatgggtgcagtactgccccctaggctgtgttctgggaagttgtagaggtgattgggaggattctcctggcatttagtggaaacagacaggaatatttgatgtcatgctctgggcagggcagtacaacatgatgaaaaatgtcctgtgtcctgcaagatttctgttaagtcctgcctgagtaaaccctctgtattagtcagttgtcatactgctataaagaactacgtgaaactgggtaatttataaagaaaagaggtttttttgttttgttttgttttgttttctcagtccttcacgctgtacaggaggcatggctggggaggcctcagtgaacttacagtcatggcataaggcaaaagggaagcaagcacatcttcacatggtggcaggaaagagaaacagctaaggggaagtgttacacactttcaaacaaccagatctcctgagaacttactatcacaagaacaacaaggaggaaatctgcccctttgatccattcacctcccaccaaatcccctcctgcaacaccagggtttacaattcaacatgagatttgggtggggacacagagccaaaccatatcaccctctaaaatacaaatcagaatactttagtatatgatattaattaattattattattttttacaagaagttgtttgaaggccagtacttgagtaaaaggtagttattgagaggtaagtctaaatgaaataaagacattgtttccaaattattgaataatttactcaccttgggtattttgtccacttgaccatataattgctacacagtaatattggaacaaattgggcagtcagataatggttttaacctgataccttattttttattattgataatccatggtgggcatccgcctgggccccacaaagtatcagctggtattatcaatcacaagaacaatgacctttggagtacttttaaagatttggcagttttgctgggcgtggtggctcacacctgtaatcccagaactttgggaggccaaggcaggtggatcacctgaggtcaggagtttgagaccagcctgactaacatggagaaactccatctctactaaaaatacaaaatcaactgggtctggtggcctgtacctgtaatcccagctactcaggaggctgaggcaggagaatcgcttgaacccaggatgtggaggttgctgtgagccaagatcgcaccattgcactccagcctgggcaacaagagcaaaactccgtctcaaaataaaaaaaaaaagatttggcagttttgatgtggtgtatggacattatttacttcctcatttatgggattatcagctttttctttccacagtgagggtttgtatttgtcttggcatgttatgccgaccttaattgaggttgtttctttccttcttttattctatgcaaatacaactagtctattgccattatttgttttcatactagtgtctgtctctacatttgcattatcattttccattaaatatgtattttttgagtggaatggcatctgatcttatttctctttcatatctaattgcattcatattaagtacaggcatctgcctacttcaggtttctggtgtgcctgcctgacattcacatatggcaatacatgttattttattttaaatgaccattccctttttctcctttatattacagctagggtattatatttattttaataatacatgaataggttatattatctatgaatttaagtttatgaaaataaagaaagccttacaaagtatttgtttcaaagggttggttttgatagattgagaacctcaggccaaagtctggtatacagtaattgtttaataaatatttgtttgctggataagtgaataaaatgaaaactaaggtgcaagtcctcattaatagctaagagaccaccattgtttccaaagcacagggaagagatgggtgtatctcagttcacatatacatagctttgaacaaggtataacagggacaataaatgagaatttgaaacattaaatttcatacttttttttttttccccgagatggagtcatgctctgtcacccaggctggagggcagtggtgcgatcttggctcaatgcagcctccacctcctgggttcaagcaattttcctgcctcagcctcctgagtagctgggattacaggtgcctaacaacacacccagctaatttttgttcttttagtagagacggagtttcaccatgttggccgcgcctggcccatacttcttttttaagctctggtcaacaagtgcatctcaatgcagtgggttttattgagtgatacagatgttttccaccagtaacaggacctattgtcagcattgttgccactggattattaatggttttttaaattatattattattagtgagtagtgtttaaataatgttgaaagacttcacttatatgtagaattctatatatacaagaacataaaattgtctccttatattaaaactattttaaaaaacatggctaatacaaaggttttctgcttaaaatgcagttaattactattttgaagtaactagggtccttcatttcttcaacattcaagttaaccaagacttcttgataaataaagctattgtaacaaagaaagcttgataggaaagctattgtaacaatgcaggtgttatttgagaaagaaatgtggtaaaagaagatctttcaaatttctttcaaatttaattttcattatgttgaattttaacagagtatgatttcaaaattttctgagcctttcatatggcttattaaacatgtcatctgctgcattttacaattttctgtggaccctttggcattaaattattcttaacatttctttaaagtgtcttctatactttataaattattttttcttgagaattagattctcaggaactaaaaagatttatttatattcagtttccatagttttcagaagtattcaattaatcagagtttgtgaccaatcctaaaatacatcctttatgtaactaattaaaaaattaactttatatacagttacaaaatctaatgtctcaggtgagcatgtccagtgtaattctcttcatgttcctgtacagattatttttattgcattatataataaagatttgaaaagcagagtttcatttgttttgggtttagagtttcagaagaataacagataaagcttcattcagccaagactgttagaacagaactactctacgactattcatccatatttcttgagtgttcatggagtaaaaatttaactttttaaatagcaagtagaatgcagttgaaatatttggttgctgaggtgttgcaaaacagtaaatctgagcattgataacttagtgcagtggacacttctatttttgtgcaaaattaagttatattatatgcaatttcctaatagctgcacctttgtgccttttaactcttgttaacatcttgtatataattcctacacagataggccttcattctagagagcaagaattccaggccatctttgaatagtttcacccagttttccaaacagcgtaacataccaagagtgtaacatcaaaaaaaaaaaaaaaaaagtctaacatgacatcaaaacatttttgatttgttgttttaatttctcaaatgaaggacattgtagcagttgttttacctcttcagagcaaaggattaaacttcttaaatgatagagtcccaacggatggtttttgaattagtaagatggcagttgtgcacagccctccacagtatggtccatcaatggaccaaataaataactactcatcccactatgatgtctgtgactggtttctactgcagcactgtccaagggtgattctactgtgggtatggactctcccatggataaaagaatatcagaaaacccagtctgctgatgagtgtgggctcaaaaatactcacacgagttgacttggagacagagctgcatttgtttatgtgtgtagttttgtatatgtgagggttttcctattcccagagtcccaattagctgctttaaatatttgtggtgtgctctgaaacaacccactcatttcctttacacttgatgagaacactagttatgatgttctcctgctcttttgtgtactaatatcacaagggatagtgcggttcatgggaaaagtgggtgtgaaggagcctgggatgtcttttgtgaataattctgccagactgtagtcaaaaccattttcattggtggggggaggactgcatttttttggtaaaaatggaagtaacagaaatcctaaatatcttttgatgggttataagatatattactaaaagataatttatatttagaattctaccctattttatggttaggatataatgagatgtatttgaactggtttacgtttagtatattaagtgttcagtaaatgttagctgctgtttagtgttgtgacaatatttcttgtcagtagtaaatttattagtagtaatcaaaattgtggtgatatatcaccacagcaatgcacggcagcccaatttgcaatctaaattgcatcagttatttcctgatttctagataatgtactttaattataatttaatgcagttggaaagatttaataaggaatgcttaatgtttgttttttaaatattcactaattatcactcatttttaaattcagaatttctataatgatctctgtggctttgcatgagtccatgttactttctaaatgtgttggacctgccagtggaaccttacattcagaagccaaatcactgtggaggctaaatggtggccattgctcttgggacttctattagtcttgttgtcccatcagcatcagtctacctgaggcgctctctattaccctcactttcctttgagttaaagcatccttctcttttttttttttcatgaaggatccccagtaccagaggatacttcaaatccccatgagattgctagtatagaaatgccggcagcagcttgacatttttttttcaagttgagtgttcagtggtcaacttgtacattaattctgcatttcatgccataacaatcctaaacttattttagtatacaagaggtgtttccatttctatatcaccaaataaaatgaattctcctggggttcctcctcttcccttaagacctctgtttagggagaataagattaaaacactttcttaagaatgacttgttaggttactctttaaatatatactatagacgaatacctttaaatggcttggctgacctgaataccatggtgggtgtcggggggtggtttttgggatgaaactggatcaacctcagatcaacaggcattagattctcataaggaatacacaacctagatcccttgcaggctcagttcacaatagggttcacactcctgagaatctaatgtcgctgctgatgtgacaggagtgggagctcaggcagtaatgctcactcacccactgctcacgtcctgctgtgcagcctggtttctcacaggtcacagggactggtatcagtccatggccccagggttggggacacctgctgtacctaatatattttggaggaaatgatacacaggacaaagacgtttagagggagatctggtataagctggctggttaagagaagtttgggggtgtttgtgacagagtagagagaaagagattgctagatgattagggaaaattgctgcatataaaatgggaaaaaagtcagcatgccaagggaaaatgccagggtggtggttgttaacaatcaaattcaccttctacaattttcaccagaatgtgtcttttctgattctggtgccttgattcggaagacccaaagaagagatgcaggttgtgattcctggaaccacagaacagaaagatgactgytattcctccttcataaaaaaagagaaaacagaagtttatatcatgtttcaatgtacactcttcacaacacagcctttcagttttgcttcttttattagttaatagtttacctatttttttttttcttgcctatatggtacagccagtgtgtgttgtctccagggttatcaggagatgatgtagttgtgttagttatgcactggtacaaactgtttcctcccattggccattgttttctacagagactgacttctatttaccagaaatggcacagtctggcatttggatgccacctcttagaaccaatgagatgacattctggattattaaaatatgtttcatgccatgctgtgggaaaaggggatgtgagaattttatgcgttagtaggataaaatgatgtttttgtacgtttcactgttctcttgcaattaggaaagttgccagttttgctactgctatgcttttaaaattcttgatgaaactttcaaaactaaatgaaaagggaacacttaaaagtaatactctgaaaatgaaggaggatatagtctcattactaatagattttttataaatggaaagattcctttaaaaatatagtagtacatatacwttatacatatctctgtaaaacagactctggtagatgcattttaaatgttagtcaaatttttaataaaatatagatagtaccaagatacttattatatatagtagcagataatgttaaccactttctaaatcaccttatatcattgtgattcctatacttatgatcatttaaatcataaagagctcttcaacatattgtctttaatcttagaactgtaaggaaggctgaaggatattttcatcatttttgcagaagagaaaatggcccagataaaaattggttgaagatgctccaaccctcgtccctgctagtgtgttcttgctctgccctgtcttcctgattctggatgctatctctaaattgtgtcaggctgtgtcacatgggcaatgcttttctttttatctgcgttgcttccatgggtaacaatgaataggagtctctagggtgccctgcagagagtgcctgctttgctgttaaaagatgcctatcaggtagtggttaaaaccacagaccccggagccagctgctggattttaagctccagctctaccacttagcagctgtatgactttgggaagggtgactgtgctctgggcctcagtttttttaatcagtaaattgagaataatgaaagtacccatctcatagggatgttgtaatgaatgattgaatgaacatgtataaagcacaaagagtgaccacactgagcaagcacttcatatgttggtctgttattattattactsaagagttgcacttttcaaagtggatgtgacttcacttttttttttaaatttatgttctgggatacatgtgcagaatgtgcagttttgttgagcagactcattcgtgatgtctatagtgttaagaacagacttcccaaagtctgctggtgtagtaaatattttttctttagaaaatacatctctcactgacagagtctttaggctctaatctctagtctttagtctcagactagattgtaaacatggtgtggggaatagagcattgatgcaggaggccaaaggcctgaactttagtcccagctcagcgattaaccagctgtgaccttgggacagtcaattaacctcatcaggctcagcttcatttctcctcaggagaaggcaaaactgtccacctccaactcttcttccaaaatcccataccataattgatgtacttgagaagaagttcgctttaacacaaacatcaggcaaagcccaactatttaatcatcccatataattaaaagctgctattagaaggatttagctattttttacagaggatagaattggcaagtgcatatttaggttttgagaaataaaatattccaagcttttgtaaaatacaagtttcttcatacaccctaaggaaaaagcatttactggcctttcataaaataggtaaattatcctttctctgagcctctgctttgtagaataatgctmcagcaatcgtcataaccccatatccacccatattgtcctttcaaggtcacactttcaggcactgccatgagaatggagaggagagggaagaagctacttcttcctctgtctatgggccatagacacctgtccctgcttccccacactcagtcattcagcccttgggccagtatcagtatacgcactttatcttcataacagtgaactaaaataagaaataaaaatagcaggaaaagatctctgttgggcactgatgtaaatgacagctaatgtgttcctgcaatcctcatttcctttttgttttgcctctggagactctttttctccatctgccaggtgggaacatcatcttcaggatgatggaaaaggcagaagtaatgtgggtgactgataatttaacaacaggcagattgcaaggatgacccagtatattaaaaaccagctcaccaagcataagggtatgtgacttactttacagaagacactttgctttgtaagctcttgtacagagggggagattttattttcacttctttaaggaagagcttctttccttgttttctcccaagactaggaatgctggatctgggcggggtaggtattgcagcagtgtgcagagtctcagaccatggtgatggaagagttgatgtcctcagcacataaagaggaggattcctcacaataggaatctcaacggactgccagcaattgcatagccagctggtcaggctcaggttgaggtacttggcttaacaagcaaagtcacttaataatgttagaaaagaaccttgggttaaaccctggaaaagtgagcttgcaggtctgggtctgtttccttattcagcaatgggcagtaagaacatagagtgatgtcactcagcacatgcctggcccataactgtcttctttgatgcctgtttttwtctgtttgtagggccaaggagatctgttgaagaatgccaagaatgaagctatagaaaacatgaagcagatccagctggcatgcctgtcctgtggactgagtaaagcccccagcagcagtgctgaggccaagagcaagcgcagcctggaagccatagaggagaaggaaagtagtgaggagaatgggaagctgtgactctgggcattatcgacacgttcacccatcttatcaaggactctggtttctcattcttgttttctttctttaaatgttttataagttcacaaaatggtgccctatatggggtattggacatagatattttcacaatgtcagtatttcagtgtagttaatttatctaaattaaagcctttagtatcagtgttttaaattctgagacatgtgtcaacacccctgtgtggatgcctgtggaagagtgtgtgtgtgtgtgtgtgtgtgtgtgtgtggcagagagagagaaagagagagagagagagaaattctgttaaaatctattctgtgttgcattattcatttagtgagttattccttgatcattttgggacaattgttttaatctgaaattctaaagagcacttactgtaacctgttgctgtgtttaatttgacttctctgcctttgacatttaatttagtgatcttagcatagcttattattgaaggaagccaaatttatcaaagcatagatgttttggtagattaaatatagattagaaaaattcctaagaatcagagtagaaataaaagtgaatgaaagattaaacagatgatgagaatttctaaaaagattagcaaggtcatttcttcagtcagaaaactttaaaaaatatttattaaataaaatcaatttttaggaagttttctgtagtcatttactaaacatatgatttcactagaaaagctgatcataagtgaatttatacctacctgtgtggtactctgaaacacactgaaagctctgttgcaattaggattttgatgtgacaataatattgttgtataatttcgagatttgtaggaaggtctcattcttccaagctgagagtctagcactcattttctataacagatatggcagcttagaggtgttggctttgtttggatgtaatttagggtactaaatttaaatttaaagatattgttcaaacaatatcatatcatcacattgagctgatataaattctgtgggtccgataatatctttgtgataatttaagagctaaccagttaccacacatctatgatataaccctaacacacacagaaaagcatacatgcaaaaagaaatgactaattagggtacatttataattgcatctaggtaatttttaccctaatgtcttcataaagtacttgagtgtaatgtttgttacctccaacagaactaaatgttctatggttatgaaagaatatatttatttaaagcattgcttttattttgaaaagcttcttaattaatttgattaacaaatatgctaatttggggaaacctagagaagataattgttgaaattttgcaaatataaacatctcctatagcttctgtgttatttctgacttcttaacactattatgtttatgttgcacattactgaaagagtaaagatatgaaaaaaacacttattgttttcttttattgtgaattgaaaaagcaaagctaatgaaaatgggttactacatcaaaaatatcttaaagagtttgctatttccatggaccagatatgatgaaattattccctgggtttaaaactgggcactcgaggaggaggtacctgaagtcatttgaaggcaagtttccaatgatgctacaatggcctgaaaaaatttctttaccctctgttatatttaacttgctggtaggaggaatagtggaatgcaggtgttaagccctttgtggtgaaaaagaggttctatagacagaaacaaaacccaccttacatcagctgattggttgattttactagtgtacctcttcatctacttgaattctatttggtaaatccatgtctttactggatatacagttaggtgggaagaggagataaaggatgacaaactctcaaacaatatttatacatttatttactccagggtcaaatccaatccttggaagtagcttctctagtttattttatttgtcccagagctctactcacacttaggacccacccaaaaattctcaaaaacgtaatatggattctgcctcatctgatgctatttctggcagtgggttgtcagccatactctgcttcattccactgggtgtccttgctagatggggagtgagatgtggagcagggaggagctttggattctgggagtggaggtggcaagggaaaagtctcctagtctcctgtgatgttcctgcctccagatagaatagcaaaaacaaacaatttttttttgtgtattatgcctccatgacattgttacattctatgaggagcatctgtctcctttctagacttgaactgtggtagaaaaagcccccttctctcttctatctacttagatttggtgatgctaggaatgtagtgttttagatattaattctatttttatttattcatttttacatcaccaataggatctgaggtggagatggcgggtattatcactggcattttacaggtgagaaagcccaaagccactgaggtaattaatggaataattgattttgaacttgggtctgtctgatttcatgtgcaagattatatacttagtgattttgattttaagtttattcttaacattttaaaccagactattaactcttacctttataaccacagatacaaagaactgtatcatttattttctgaatataaaatattaatggtcaatataaaaatacaaaaatagagaactacatacaacagaaaagcaaaattacccactaataacactttgatttatatccctttagacactgtttagagtttatacatatatgtaaatatgcttgtattttaacaaaattgagatattatataaactgtttgtagcagggtgtttaaaattttaacaatatgttatggatatctttctgtgtcaataaatgtgtatttacattagagttccaagcatttgaactgaatctagtccaaaaatgatgtgttttatttggccattgaacattttttaaaaaaatctttaagcaatagacagcttttgaaattcagaaaatgttacgtacaattcaatgtcctgcatgttttaaaatactggataatctaacaacacagaacacctcccactccccacctcacaaccaccacacatatactttcttgcttggcatcagttaattgaaactgccctctccaaaaggggcatatgctgtccaattttctagagagccttttcattcatttatgttacatctggaccttaaggacatgataggtggtgaaacttgatgaaaattatcatttattgagaggccaaaatgagagaattgcttgaggctgggaattgagactagcctgggaaacatagtaagaccttgtctttaaaaaataaaaaaaaattaatggtcatttataataattatacagtatcttattatatggcttaccagaatatatttaaccaatctcctattgctagattttactcacctaatttcttgttatataaacattccaataataaaatccatttttgcaaagttgttcaactttttctttgggatacatttctagaagtggaattgttgggtcaaaggatacagagattttttgttttgtttcatttttgttttttagggattttgagatacattgccaaatagtctcaggaaaacttgttcaatttaaaaccccaccaggagtttatgagagtgcttaaatctttgctaatgataaatttaatttttcttattttcatctttgccaatcttctaagttacaaaaatcttatttctctttatctttaatctctaatgagattggatgcatattaatatgttcattgactctaaataatctaattaaaagtaaaaacttttgtactccaaaggatactaccaagaaagtgaaaatagaacccacagaacaggtttgcaggtcatatatctgatagagactggcaaccaaaatttataaagaactattacaacttaataaaaagaaaaccaaatttttaaaaactggtcaaaggattggaatagacttttcttccaagaaaatatgcaaacaggaaataagcacatagaaacgtgctgaagatcgttaaccactaagatcacataaatcatagccacaattagatatgacttcacaccaaataggttggctataataaaaaagacagataataacaagtgttagtgaggatgtggagaaattggaaccatcctaccctgctggtggaaatgtaaaatatttcagctgctttggaaaacagcttggcacttcctcaaaaggttaaaaaaacatggagttaccatatgacccagcaattctactcttagatttctacccaagagaaatgaaaatatatgtccacacaaaagcttgtacacaaatgtttgtggcagcattttttataatagtcaaaagtagaaacaatccaaatgtctatcaactcatgaaaggataaataaaaattacatattcatacattggattgttcaacaataaaagaaatgaagtactgatacatgctacaagagtataccttgaaagcattattctaagtgaaggaaatcaggcacaaaggccacatgttgtaccgttccatttttataaaatatccagaataggcaaatcagtagagatagaaagtagactaatggttgccagtggctgtgggggtctgggagtgactgctaatgggtatgagttttcttattggtgtgatgaaaatgttctggaattagaaataatgatgatgtttgtttacataatttgtgaatgtactaaaagctatttaattgtatattttaaagagtgaattttatggtatgtaaattatctcagtaaaagggttataaaaggagaaataaaaagaatttaaacaatgaacagggtattagagaatagtgaaatagcttcaagaatctaatatgtatgaaactggagagaagagcaggaaagaaaaataatttgaagaaataatggctaaaaatttctcatttgtaatgaaaactataacctccagatccaagtgtctcaaaaattccaaggacaagaaacatgagaaaaacaagttagtctgttttctgctgctgtaatagaatgccacagattgtgtaatttacaaagaaaagaagtttatttggtttacagttctggaggctgagaagtccaagagcatggctttggcatctggtgagtgtaattccatgccagaagggcaaaaggtggaaggtcaagagagcccatatgaaggaggttttgctattataacaaagccacctcctctacaactaccccactccgatgacaacacctttcatgagggtggagctctcatgacccaattacctcttacttggccccacttcccaacactctggcatagggagtccaattaagtttccaacacatgagttttggtgacaccttcaaaccattgcaacaaccaaggcatattgtagccaaatagttcaaaagtagtgataatgagataatcttaaaagcagccagtaaaaaaagacatgtacagagaaaataagaaagacagcgtatgtcttattgtaaactgtgcagatgagatgccggtggagcaacttctttaaagtattgaaaacaaagcaaaaactgtaatcctggaattctatacccagtaaaaatgaattctagaattctatacctattcaaaaatgaaggttatacaaaaaaattttcaaaagctcaattcatcaccagtagacttacattataagaaatgttaaaggaaatccttcaggctgaaggaaaatgatgccaggtcaaaatatggatgtacaaaaacagatgaagagagagagctagaaatagtaactgcagggataaatatagctggccctttgtatctaggggttctgcatctgtggattcaaccaacaatggattaaaaatacttaaaaactgataaaaataacaatacaaaattaaatacaaataaaaatacagtacaattatttatatagcatttacatttaattgggtattatgagtaatctagggataatttaaggtatacaggaagatgcataaagattatatgcaaacactatgttattttatgaaaaagacttgaacatctatggattttggtatttgcaaggggtgaatggggtatttgcaagcagtgaatgaggaggcctggaaccaatcttctgctgatattgaggcacaactgaaaaaggtatattacttaaatctcttattgtattgtaaactgtataagtaatgaaattaaaaggcagaaattgtcagactgaataaaatgaaaagaccaaacaatatgctgcttacaagaaacacaattcaaatataaggacacaattagtttaaaggaaaagaactggaaaagatataccatgataacacaagtcagaagaaagctgctgtggatatattaatatgagatgtagatttcagagcagtgaatattgccaggcataaagaaagttattacataataattaaggtatcagttcatcaagaagatgtaataaccctaagtatttatacaactaatatcagagcttcaaaatacatgaagcaaaaaccagtggaattgataggagaaacacacaattacacaattatagtcagaattttcaacatatctttctcaatggagaaaacaactagacaggaaatcattaaggatatagatgatttaaattatatgatcaactacctggacgtaattggcatttatggaacactgcaccaccaacagcagagtacatattattttcaagtacacagaaaacagttaccaatatagaccattttctgggtcataaaacacatctcaataaatgtaaaacaattaatgttatataaagtatgtgctctgaccacaaaggaattagagatcaataaaagaaacatctttgaaaaatctcaacatatttaaaaactaaataactcacttctaaataactcctgtatcaaagaagaaattaaaaaggaaattagaaagtactttgaatttaagtgtcaaaacatccaaattcatgggataacactaacactaagcaaatttatagcagttaacacatgtattagaaaaaaagaaatttctcaaaccaaagacttccattttcatcttaagaaactagaaaaaaaaagagaaaattaagttcaaagtagaaaaaagagaataaagattagagtagaaatcaataagatagaaaacaatagagaaaatcaataaaacaaaaaggttgaatttttgggaagatcaataaaattaataaacctctagtcaaacaaggaaaaaaggaacactcaaattaccaatatcaaggtaagatcagacatcatttcaatattgaatcaaaaaaacgagtgagaatacatcactccaaattttaaggatattaaaggatagtaggcaaacattatgaagactttctgctgataaattctacaacttcagtgaaatgggcaaattccttaaaagacacaaattgccaaatctcaaaatgatgagttaaataacttggacaaaaagtacatgctgtatgtccagtaacatacatttctggaagcacaaactaatgaatagtaacaaaaagtagataagtggttacctggggtcagtgtggaatggggagtgtgagattacaaagtggataaggacatatttgggaataatatatgtgctcattatcctgattgtggtggtgttttcacatgttagacatatgtcaaaatttaaattgtatactttgaatatgtgcagtttgttttatggaattatatctcaawaaagctcttagaaatacataggagcacctctcagttaataattttaaggcagcttttaaaaaatataatagttgaatttgtctgggtgcagtggctcacgcctgtaatcccagcactttgggaggctgaggcaggcagattgcctgagctcgggagtttgaaattagcctgggcaacatggcaaaaccctgtttctactaaaactacaaaaaaaaaaaaaataagtcgggcttggtggcagccacctttaatcccagccacccgggaggctgaggcaggcgaatcacttgaaccgggaggcagaggttgcagtgagccaagatcatgctactgcactccagcctgggtgacagagtaagactggtctcaaaaaaaaaaaaaaaaaaagatagttgaatttttcttttgtcttggaattagtgaattcatagattgagcttttttcagtttatagatgttttctttttcaaatttttatttttttttgcatgtgcagtgtgcatgtatgtttgtgtttggaaattagaaacacacactcatacatgcacacagcacacacatggaaatatataagaatatgaaatatttgcttttgttgcagctgctctggattctttgggaacagctttggccatatcatcattatatcctttccctcatctttaatcatgttaattttcttcacttttctttgaatcatgggacgtattcttgtacctttcctatacaacaaaaattcaactttatacccttttcctttatagtacttgaccacattttgcatgtcaaagcatttcttatttatctcctcatccagctccttcttttttcttatgattgattgtctgaaaattacatctttaatagttaacatttactatgtcttctatatgtgaagtactgtgttcaatgcttacatgcataatcttgctta

SEQ ID NO: 94953 - DNA, 40429 bp, Homo sapiens
  misc_feature (1)...(40429): n = A,T,C or G
tctctccatctgggcatcatttactcttccttcacttgcactgctgtccccagttgatcttactttaaaagtccctcagagaataacctaataacgtacacctgaatagcacttctaacttctcacagtattttcaatccgtctttcagttcattggcaccacaccttcaggagacagggaggacattggcaagacagggctggcatctggcagggccccaggccacccgtaggtctcgcgagtgcagggacagctcctgacaggatgaccctgccggcccacgtgcccactcctcctctctctgcagtcgcctttctctgtgcccatgaggacctgctcagcccacctttgggtggcttggaagtgcctgggatttaagtccccacacggtcaccctcaaccaccagtgacgagcatctgtggataaacgcccccccccccccagtcctcatcccctacaggacaccaaggtccattccgccagagctcaggggacacaacaaggtggcacccggtgtcgctctggttctgtgccctggaagctcctctccctccctgactcacatccccactccccatcctgacttccgagatcacctcccagtggtgcacctgcatcccagccctcgtcatgaggtgtgcccagttaggacaggcggcagcaaccctggttcattgatggggaaacgtgttgccccccagggagtgcttgacagtgtctggggcacttttggttggccctgcttgtgtgtggggtgctcccgacatcttgtggtggagcccagggatgctgaacacccggcagtgcccaggatgggcccggagcacaacccagccccagatgtccacagtgccgatgcccaggattcctggcctggttctgcagaattcttttattaatcacttattctggactgaagcctggataggtaattatcagccttagatttctactcaagcaaaattagcagaatcccacctttccccgttggatcaagcgtgccatgaaatccatgccttctttattccttcctgttggctcctgtgccacgctgccttgctggggatttgtctgtgcaattgtcaagaggccaygactgtgtgcccacgtttgcatggcacgtaagcacatcacacccaactgcaggcatgcagccggtggtcaggtctccccccagagcactgcgtactgcagaaacacacccagttttcatccacgcaggatggcttggatgccccctgcccgtgcccagcctcaggcccctcctcgggttgcctcccctgcaaccaaagtttcagcttggccgtcatcccctgcagggagcatccttgacctcttgccttggagggcctggcatgcttcacacacagcactcaccagcctgtttcacacgctcctacgcagtaagggtgtgagggcagcagcacctcttctcctcctcaccccagggcccaggctaagggtgctcgggaagcatcagcaagccatgctgggggctgtcaggaccctgtggttctcaaaaccacatcacccaccccgtgagagatcagagacatggacagcacacgctggctgaaggttgcagtctgctgagggtcactacagcggtgccactgacccatcacaccctcccacactgcctgttcaggtagtgtatgcagacacacgcgtatatatgtggacacactcatgcatgcacbcwcacacacacgcttgaggaaagtcctctctcttgctgaactattctcagccccagtgcataacaggtctcctagtggggtctggcttctgacactttcaggggcccccgtgacagacactctagtgcatcaactcctcacttaagaacggctcgagagagggcttccctttcactgcacaacagaagcaggctcttcgcagagctggttcccttttctttcaggtaataacgctctccaccttcttcaactggccagacgcctgcgggctgcaatgcccatgtcaagctgcttgcagaggccctttgtgagggtgaatgggcacagcacagagttcacagcaacacacaccggcgtctgctccccctggagaagtgatgtgggtgctggggaggagctttggccctcatgtggccatgctgccccctctgccgccccaccaggcctttctgggtgaccctgctgcgcccctgctgctgatctgggcaggagggcgctccccccgcgctaggcttcttgcgtggtctcctgtctcacaaaactcctttctgggagaaggggaggtgtccctggccaggaggaaaggagccgtgagaaggctgtcgcatctcagcatctgctctgggttggactgtgctccccacccccaaattcatgttgatgacagtgctcccccaaggcatggggctcactcaactatgaatcccgatgaccagggaaggaccagcccactccatccctccaagtccttaccagttgtaggtgtggtcatcctctagcaaggggagctccttgcctccccctgaatctgggctcaccctagggactgaaagagtgcggtagaaatgacacgctggaatttctgaggctgggtcataggaagcctcgtagcatctgcttgggtctctcgggacactctcgggaagctcactgtggggcagtgcaagccacgctgtgggccctgcctgaggaggtgctacgtacagcctgaggagcactgagaccccagacaggagagccggtgccatcttggaagtgggtcctgcagttaatgccacacagatcagacaaactgctcagctgagcccatcccaaatgcctcacaaaatcgtgaacaatgtaaaatggctgatttaagccaccaagccttggcttgtacagcgacgggtgaccaaaacaccacttcttccaagaggctctaagcagcctcacggagacatagagaagtcctgcccagcctcacccagcaccatccaatccctacctgcagcctgagttcagagagaatgaatgaactaagctattcggaaggtctattttaataggaaaatgttttttagttggaacgttttggaaataagataacgcaatgtcttctatagttactcatttacactgaaacgtgatgggtaacttttagggcgtttgcttccagtcactttcccctgactccttgatgtgataattccttccataagatacaaccattctcccaagtgatgcgatgacgagtatgtgcgtgactctggagggaaagggtctacatctgtctctgcttgtgcctcggatgggttttacagtagacgtaccaccgaccccgcctcttcaccaggtaacagtccttgcagcgcttcttaaggacagtcttgtttttgaaccccagcgcaggcagcagatggggcaggaggccgggtgagagaagtgagcgcactgctgccccgggttccacagccacgggggctgcacctcgaatggatccaaatagaaatgtggagagggctcgaggcttcaccgtgtgacgactgagatagagcagagggttcaccattttccttataaaaagatttgccatgttgtggtgaatctatgggagagagaaaaaaaggagttatagcttctcctgcacttccacctgctctttaaggcttccttttctctgtttcactgaggcttgggaaggcagggacctcggggactgagggtgttcccataccagctgcagcctcgacctgagcttgaacactgccttaatcagccaagtgtgccaggagaataaggggcagtggacggtggcttccttccctttcccgcctgctgcaagtgtaggtgagtgtgcaaagccctgcgatgttgaggagccgctcacttggctgggagggagcttaaacttaggccgcatccctttccaaacagacaccaggtcaaggacggttcaactgatgagctcctccctccaactcttcccagacccaggggccctccctcgggccagtttcgggacaggcccccgctccggaagagcacggaactctggcaccccggtcgcccgcccctgcttccccacgcgccccggcccttagggttcagcggccccggctgggaagagctgggcctgcagggcccggaggacactgcggcaccggagccggccctgcgcgcgggctgtgaggtcgcgttcgggagccgccagttctcccgccccggggtcgctggacaccccctcctgtcgccaggtcgggcgcccacggtcggacccgcaycccccamccctggccctctgagaccgccaggccccggcccacgctcctctgaccgcagcccactcggggagacacgcccgagggtcccaaggtggccggccccaccctctcgcagcccccactctcaagacacccgggacccctgacctgagaagacggctcccttacccggccgcacgctctcacccggcgccgacccctgcgtctgcgcactggcacgcggacgctgctgccaggaaggaagatggcggcgggggggggggtcacgtggcgtgcccacgtccagtgcggggcgcagagacgcagcagcgagtgcgcaggcgctggagtgcgacgtatcactccccgactgcgcgcactctgcgggccaccgggatcgtcgtgctgtttggagcgctctcgggaaaaaaaatgcaaaaaccaggaacgaaaatggatatccgcaacgaaaaagaaattacaaccacttaggccttagaaaaaactggcaaataccaatgtcaaaacaaactgagaaagaggacatgtttttaagtggacaggagaaatgtaaacaggctccgggaaacgagtggagacgggcagtagtttcaactggttacggctgttttccccaacattatgaaaaacttcggacatagagaaaaagggaaagaactgtacggtgaacacccatatacttgccacctagattctacccttagctcgcttatccctgccttttcaggtatctacccgtaactccattcgccttcctttttgtgtgtgtccgggtgagttgcagacgtggctgcgtccactccgcgctccctgcaggccccaacgcttcatcgcagcgcccactttttccacctgacccggcgaacaccgggcgggccgctggagtttatcagctccaggacaaatctgcctctgaccaccacgtttgctgggacatctttgggaccggaggttttcatgtgcattcttgtttctcatgcctttcctcctctttatcatcttccccgccactcatccatctctagtgttttgttcttggagtcacgtggtcctcaggctctgaccacagcaaaakaaaagctggatgctggagcttaagctgggatttatacccaagtcaactctaagcaaaacgggcctttttagaggctgtatttgcatgctgtaaaatcagtcggtgtactaggctttgttgcagaaatccccaatatacgtttcctctgcggctccccgtaaccacacacaggaacgcttgccttgaacgaggagaatgcacttccagtctcgtctgctaagcagttgactccttcacccaataattttgatatttaaatgtctcatgattatcggttaccataagaatataaacaatgtattttcagtttacatcctcccctgcctgtccgctaaataagaaccactgggtactcctaatcgctgaaggtttcgcacaccattgcctgcctcatcagggccctagctctagcctgcggctgcaactgcatgaggctgcacctgccggcgcaacggggccgcttaacttttaggccattgatgaaaagtcaaacaagcgcacagtactcggtgtaatcaggggcatttttagcgagatacctgggatgaaaacgggtgaccacctgaatcagagagcagctccggcgcaccctctgccccgacccgcgctccccccgccccggggcgaaataaataccgggtgtttggcgccgccagaagccgtgcgcatgcgttagcgctaagcgggacgttgcgccgggtcaaaggccagcggcgcaaaatggcggcggcgatgaccttctgccggctgctgaaccggtgtggcgaggcggcgcggagcctgcccctgggcgccaggtgtttcggggtgcgggtctcgccgaccggggagaaggtcacgcacactggccaggtaacggccgctgggtacaggatgcnccttcctccagccgcacctcgggcgactggtggcagtgggctcgccgggcatccgcggccctggttctgcgccggcagcgcaggtcgtggtaaggttgtgctgtcgctcacgcgccggggaggacgcccgcgagtcgggacggtggtggcagcctgtagcggtgggtctcgtccttccagggcctgcgggctctggaacgggaagtctccccagcgggcagcacttgctgtggactggctgcccatrggcgatttgtggcagccgattatttgggtcagaacgtttagaatttgtgtaatattcaataataaattttagtaacctgagaagtcggttgtagtccaaggcacaaaaaagccctaagccaaaatgaagaacaaaggtacctgtgtatactggaatgtgccctagtagatttaatggggggatagtaaagctctcaggccatatgccaaagaaggttgggggcggttctcctcggtcaggatttgtctctcctccttagctccaccttcccgggctatgtctctgtgctgctntctgatccaggtgaccacccrttttcatcccaggtatctcgctaaaaatgcccctgattacaccgagtactgtgcacttgtttgacttttcatcaatggcctaaaagttaagaaaaacactttsctgtaatatttatgattgatatgaagtgactttcagaattaggccgtaaaagtcacacatggtctttttgtttttttccaggtttatgatgataaagactacaggagaattcggtttgtaggtcgtcagaaagaggtgagtaaaaaatctagtgaagagaggtaagctttcctaaaacttttatgtaaccaacaagaaataaaaattaatatataagatttaaataaattttccccatattgcaagcaccctaacagttctggatggggttcttcctttcttaaaatcttaattgtgtctatttctgacttgtttccccctgaaatacataacattgtagccgtagttctggtttgcatataaatggaagtgatcttttttaaaattcttgtcccttattctcctgagactctcagatttaagtaaatcatatcaactttaaaaaaattattcttttaaccacctggaggtgtgttttttatagttttcaccaaataaattagtgtgtgttttttacagggacttacactgacaagctgaaaatggcacatgagtttttcttcccttagtgggtctgttagctctatgcattgtaagggaagatcagttcaggtgcctgtgagtgaccactggagaaagaatgttgaaattagaatccttctgcctaaatcagcctattttttttttttacctgactccttctctatcactcatgtcaatgagctcctgaattcgtaattagatcaggcatgcctccatgattcctgaatttgcttcctgaaggatgctgtgaagtgtccttcacagccascttattcattctttttcccactttggttagcctggtgttcttcttgttaacaccgtagctatccctaaatcatgtattttcccttctccttcaatcttggttacgttatccattcccagtgtgtagtttttgtacgtctattccagagctacagggcattcyagaaaagctcacatgatcatgaattgactataaattcacattctcaaaattcagctggttcactgttgtgtggtttgatgggtgggtgtcagaaaagtttgttttatagtggttgattatttggcaatgccacttgagtgttgggttgagaaagatcctgaggcctgatgcacattcagtggaagagtgtgccatgattgattagtgatgtctaccaggatcatggtggtggagaggagcttgtgtctggtgggtttgcctctcggagtagaagctgtgtggacttgcagtctaaaaattgtgaggttgaatcacagcatgggttcagttttctcatttgtgaaatggaaccatgtgaatatttttaattgaatcataagtctccagtgatatcacactgtcagttgtcgagtaagtggtgtatagggtaagtgctctttctctccatcctcagaaacccttttctgtttgttgtttgaattgttagtgtattcccagtagaagcatctgttccatgtgccacattctccaatgctgtatcccagtgattcacacaaaggagctcatggcattgygaatgggacatttcttccgtgtgcaggctgtcctgggcattcttgttaggtatatgaacttgacatttggaaggtggaaaccgatggatgttgaaaggatttgcaggccctttggtttcttttggcagtgatcgtggagaaggggaggtttctcytagtgtggatgcggtatggtttcttttagtggtgaccgtggagaaggggagaaaccgatggatgtggggagggttcgcaggccctttggtttcttttggcagtgaccgtggtgacggaggtttyctgggcatcgatgggtggttgttactgaggtagtggctggactctacatccttgctttgtgggtgttatggcacggtcgtgggggcaaggtaggagccccagattgagcagttctggagcagattggtcctgaagcccttgggctcattcatgcaatctggcttccagcccagctccctatctcagctcttgtagtgacgaagcaagtatgtgggtccctgtcacaaacgcctctctgctgaacattctttgtgtagcttctggtttctggttggtgtagcatagggtagtgggaaacaacttaaaccaaacagaatcaggattggcgaagccagtgaggggtgggtacrggatagtgtgatagtagtgtctgtgaccggcagctcacccagggcgtcctggttgtgacctcaacgctccagccggcctagcctccagtgccttcccccattcagcatcctgagtgtccagggcacgtcttggcctcacaccttggaggttcaaggcatgttgataacatgatgagtgggcatcctgcccaagctttccttctttcaacacaaatttggtgtttagtactatttttagtagtagttgtttggcttctgagagacttaattttttggaacacttttagatttacagaaaaactgaagaaagtagggttttcacagccccccagctcagtttctgctgtttactgccatctctcattagtgtgctgcctgtgtcacagttgatgagctgatactcatacattattactaactcaagtccacaggttcactcttaatgttgtatgttctagggtttggatagatgtgtaatgacatgtattcactgtgacagtgttgtaccgagttcactgccctaaaaatcctctgtgctctgcctgttcatccctccctctgcccaacccctggcagcccctgatcgtactgtcctctagttttgtcaagtaatactttaagaagtaaactgggccaggcacagtaggcttatgcctgtcatcccaacacttcgggaggccaaggtgggctgatcacttgagcccaggcgttcaagaccagcctgggcaatatggtgaaaccctgtgtctacaaaaaatataaaaattagcctagcatggtggcacatgcctgtagctcaagcaacgtgggaggctgaggtgggagggtcattgagtctgggaggttgaggctgcagggagctgagatcatgccattgtactccagcctgggcaacagagcaagactctatctccagaaaaaaaagaaaaaaataaactgaatctgaacttcacctgtagaacaagcatagcaggaagctagataattgagctggtctttgcagaaaaacagtggaaagtatctttgtgtggctcctgcccagctttgaccgggggtaccttcaaaggaatccatggcccctgggcctgtgacgggcctgcctgtgaggagactcctcacgtgctaaagaatgtgccagccacccccagccagaagtcaggcctcacatggtcctggagcaggtggcactctggggccacataagtcagatgggggactggaacaaacttggaagtgaccaggtatttctctgctgttgatggaaatattttcattgctttatagtcgtacaagtaaaattaaaagcagatatgacttgtcccctaatagaagggatgactgggggaggtctgcagtgaggtgtggtaataataacagcaataacaacagcctggtagccaggtacttggcgacatcatttgcttttttggttagtagctggggctgccctgcctggccgcatccggattcaggctcctgcgctgatgggcttatgagggctgtgtgcttcagtgacttakcttgtaggctcgtgggcactgagtccgtgtagatgaggaaaggcttggagcagcgcctgtcccagggaagcctctagtgtgtgttcgccttactctgctgctgccttcgccaccaccatgagggcaggcttcacttttagatttttttaaaatactgaagttaaacgttagtgtctatacacaaggtctttacttttagtttttgaaaagaaggaattaggcagcaaacccggaacatcaggaggctgggatcccttgagtgcgactctgtgccacccctctccacctgtgtgtgtcaggatcacggaacagctgggggcttcagcttgtgccttcatctgcccgccagtgggatggattctctcctcagatgctcggcagggcggagtcactccctgacccgcacagcccacagctgggcgtttgggtcagcgagattctgcacgttttctgagacacctaggctggcagggttgagtccagttgtgaccctgtggcctcacctgcctggccctcagttcttcagtagcagacttcaaggtgcgtggtgccaccaggattaggagcagttgcacgyggtgcaaatgtctacctggcgtgctgttttgttgcgataatgtgaagttttatccttctgagaagagtgtgtagatttcgttaatggaaataattgagtagtgctcacgagagaggaaaactaccaagaccctccaaacagaaaacaagcgtgggtgacggcgtggagcaactgaaactttgtgccttgctgctgggaatgtaaaatggcacagccgtgaaggaaaacagcgtgtgggttcctcaaaaagttgaaactaggacttccatccaatccagcggttccacttctgagcgtgtgcccaaaagaactgaaagcggggtccggggtacactcgtgtcatagcagcattattcattataactcaaatctggaagcagtttgggggtccattgtcagctgaacggataagcaaaatgtgatctgtccatggacagtggaatattattcagccttaaggaagaacgcttgacacgccccacaacacggataagcctggaggacgttgcgctcagtgaagtgagccagtcacagaagcagactgcgtgattcctctaacacgagggaccagaacagtcgcttcttagaagtactgtatgaggtactcagaggtactgcgtgaggtactcagaggtactgygtgaggtactcagaggtactgcgtgaggtactcagaggtactgygtgaacactgtgtgattcctctgatacgggggaccagaacagtcgcttcttagaggtagcaagtagttggtggttgccgggggcggggggtgaatttggagttagtgttgaatggaaatggagtttcagtttacgaaggtggaaggttctggagatgggtggtagtgatggttgcacaataatgtgaatatacgtggtgtccttagaaatggtaaagatggcaagttttatgttatgtgtattttaccacaattaaaaaaaaattaagagggaagtggcttcaggcccacgcaggaattgaccagaggttcctccctgaggcttctgtggctggtgtcgctcattcttatttctcccaagaggccggcagrgcagggcacactcgggtggggaagcaagtgaggctgaggctgggcccacgcggcacctccagaggctctgcacacccgtggtggtaacttgtgttatcacccaggacaagcgcactcctcggatcagcagtggaagaaacttgtgacatctttcgtctacattgagccatctcttgaggccagcgcagcaccacccgaaccatgttggctctcgtgcgtgcacacacacrctgttggtcacaggagggatgccaccagagagctgagagggagtgctgaggtacccaggggtcagtagctgcaggaagcagccactattcctaggacttggggggcaggaggaagaggtggcgtcaccaggagggagctgtgaaagtgcccttgtggtgccgctggagctccaggtgggagacaggactgggagtcggggatgggtgctagggtgaggcccccagccagacagtggtggctgagaaggtcctccgtgagaggaagattgaattgaggggcctcsgaattccaccctccgcctttgcaggtcatctggttggtggcagaggtggagctctgtgcttgcttccaggttcatccttagagggtttaagaggggaggtttgcctgagtctctcttgtcttgaagcaacctgggcgtcctttagggggtgtttgagacgcgggcggtgcgatgtgcgccatggctgctctccagagcttttgtgtggcttcccgcttctgcatgctcctcctcctgagcttccctcccaaatacgccatctttatagtggagtgaaggcaatcggattttaaaagaaatcttctggatggataagaaccgtgggtctttgcttcctttagaaaggcttggactgtcagaaataatggttataaagtgaggtttatttatcccaggacccagaggaaaatagttggaactgtgaattcaygagccccaggttcacatgctggtggctttgtttgtgagctggcgagatgggctttatttcctccctcatgcagctccccagcttcgtctttgcttctctattgtgtctttgtgtcttgtggttctttctcttccaaggcactggcaaaattagtcactggattccaacattctcaaagcaagtttgaacatgttgtacagacagctcaattgtggtttttagagcattttctatraagttacttagtttaaaaattaatttgaatgaaaacttcagttttgcctgtgatttaagaattatatacttatatagacatgtatacacacgtttagcttaaataattattggcrttcatgttcagaatgcctgatgttctaaataattgaactgagcttttactttattttaaacttttattttaaatrtccatgaatggggtcggtattctacagtgtcgatgatccagctggtggacttttcccttctgcgttggttttgatgctgtgtcacagaatcacatattttatgttttatctttaatagatgtaatctcagtttgacacaataggactttgactcctaaagatttaaacctacatatytttatgcccaatcatttgatcatcaagaggtcaatggaaagagtgtttcctattttttacattagtgacgggcgagggactcattttacagwggttggacacttcactgtgtatgatgtgccgtgtgcttaacaagagatggcgtgcgggctgctgtgacggttctcccttgattccctcgtgaagtgcagcagcgctcttcagtttttctcacctttccccaggtgaaagcaggtgagaatggagccttgagtctgaacccagagcggggctttgtgttgtggctgggtgtgttcactgccggagcttggccrtgtgaacccggagccgggctctgtgtcgtggctgggtgtgttcactgctggttctttgtattcctgcggttgcactgagctcctggagccagacgtttgctggtgatgggcggtcagggtcacccttgagcygcgcacactaaatgacgggagggcatcccgcgtcagtcrccagtgtcgaggcgtcagcagccctccctgcagggaggtggccggtctctttgactgccgtgatcggggcctggcagtttgttagtgcggcctttgtgacacgttgtcacttaggcagacaccatattatttacaccataaggcttaatttgtatggttagttgcatcgcctgcagcaggggtgagcagaacatcgctcactccagagccctctgtaaggcgctgcgacaaggcgagccgccgggccggcagcagaggcttgtgttgctggagcgtgtggaacaacctgggcggcgccacacggctcaggcctctgctttaatgtggcttcattttccactaacttcctactgtgtttctggaaatagatcttcaaggaaaagctttacacaatggtcatctgtaactgacagaacctcttgaaaaataaacctttccgaaacatatctgtgagggagagtggtgccctgcctcccactgcgtgtgtgttctctgtgactgtgtggcattgaatgggcctctagtctccagaaatgagtgactttgtgatgagccctgttgctgcttccactctggggcggggacgctgtagaaggagcacaaagtttcaggctgtgccattaagcaggggaaccccaggagcaacatccgaggcagagggttgtgtcatgcttggcggggctggccctccaggaggggacatgcaggtagacccacatccctgggcttagaggcctgctgggggtgtagagttgagttccttccctctacatgcacagatgccggcgctctacttcccatagcttcccggttcttcgtgccttgtcttcctggcacttaatcgttgactgttcccaggggcagctgaaaggggctggctcattacagagtcagaggaaatcaaggcatgtcccctttccaagttcccaaatttgccatcgtgagcatcatcaaatacattatttgccaagccaggatgttttaattgctttttaaaaaacataaattctgtgaaacagagggaatagtctaatgattcccttttcccatgtatccaggcagtcagtttcaacaattaccaaccgaagtagttgtcggaggggccagtctggctcagctcctctaatggttgtcggagtggccagtccggctcagctctgctaatcgttgtcggagtggccagtctggctcagctctgctctgcctctcccccggccccccagcccctggtaatgttgatgtgaatctttgacatcatgttactgagtctaaatttatctgtatgtaagttgacccttgaacaacataggtgtgaactgtgagtccacttaagtggcttctctttcgcctctgccacccctgagacagcaggaccaaccctcccttcctcctcctcagcctgctctacgtgaagatgatgaggatgaagacctttatgacgatccacttccacttaatgaaaagtcagttcattttctcttccttgtgatttccttcattgcattttcttcctctagcttactttattataagaatccaatatataatacttgtaacatgcaaaatatatgttaatcgaccatttatgttattggcaaacattckggtcagcatcaggctatgagtaaattgtgggggagtcaaaaataatatgcagattttcaattgtgttgggggtggttcccccaacccctgagttgttcaaggattaactgtaccttcaaaagatactaacattcagatcttacagggaagtaaaaaaaaamcaaaataacaaaatatattaacatgacaacaatataattatcacaccttaaaaattatactttctttaagttaaatatctaagtggtgttaaatattcttgatcatgcatgtttttaaaaatgttacagtgtgactccgagcccaggtaagttcctacatgcagctgttggtgtctcttatgtctcttttaatctgtaggttcccatcggtctcccactctctttctcattggagaattttatttgttaaagaacctgggtcatttcctctgtagagtcacccacagctggattctactgaccgcatcactgtagtgttgttgaacatgtctcttgtctctgcatgttttgaaattagttggatctcaagacttgatcagattgagggtcagtgttttgttcctggtgagactgctacataggtgatgtatccgtccatcaggaggcacataatataattggttctggttgtagtaagagactttgatcattgtctcttacatctgtgatttcataaggggttgtaaaatgatattatccatcttattaggttgaatacttatatcaaaagaaaccttggtgctgaggtaaagtttctgtaggaaaatcagaagaaatacttgattctttccctatatttaccagtctttaatgggttgattctctagtttctgtttgttttgtgttgctataacagagtacctgagactggataatttataaggaacagagatttatttcttacagtctggaggctgggaaatccaaggttgagggctgtgtctggtgagggtggaaggtggaaggactggagagtgtgcatgaaggggactgaactccttcttctaccaggagcccgctcaccacctgtgagggcagccagaatccttcatgaggcagaaccctcatgacctcagtacctctgaaggccccgccctgtctctcaacactgttgcattgactattcagtttccaacagaggaactttgggggagcacattcaaaccatagtacctggtaaggtaattaatgagtttttaaaatatgtttatgaaatcatgagtgtaaaaatttgtgtttccacattttgcagttataatccccttgtccctccaattccctgtatcccagattatcccatgtggcaaatttccccgggttgactcctcttttaacacaaccttagttgccttaaaaacttccctgacttgtgccacagtagagtgtctgaagttcattctataacatttcctgtcctggacccagaatcagtcatttttgaaagaatccagtcccttcccttcggtgtgaaatggtgtttagagaccaccatgtgggcagcaggggtcctcattgccctgagttaatcatggtcctggggatggagctagaaagggtgtgtgtaggccaggctcagtggctcatgtctgtaatcccagcactttgggaggccgaggcgggcggatcacctaaggtcaggagttcgagaccagcctgaccaacatggtgaaaccctgtctctactaaaaatacaaaaattagtcggacgtggtggcgggtgcctgtaatcccagctactcgggaggctgaggcagagaattggttgaacctaggaggcggaggtggcagtgagccaaaatcgcgccactgcattccagcctgggcgacagagtgagactctgtctcaaaaaaagaaaagaaagggtgtgtgtgaacatcagacatgggatgagtcacactgatccttccaaacttagttcagggttacaagacttctgctgaaccagtgagctgacctctctatttccttccccacactgaaaatcctgatttttcaataataatttcatttgctttggaagcggttttattcttaaggtgtgtcctgttagaaatgttcctgttactctcttaaagtgttgggaattccttaggtccatttgtctcttttaaaagtttagttttctaactttgaaaaatataaaatatagtctcagtcagatttataaaacttggaagaaagtctaacgatcgtgctcgcgtcctccttcctttccacctcacagtagtaactgttcagtgctttctyctttggatttcatgtaaatcagtgaatatgtaggcggacccctggtattccccacatggatgagtggaagcttcctgtccacttacccactgcctggcatctccacgtagtcctgtgtcctccttcaccccatcgcggtattatggagacacttttttcattccgttttgatagtaactgaaagcatcagcacacaagcaggacgtgaagttaccagagtctttcccgcacatgcctatgagtcataaatgaccaggtggaagacacagtggatgaggagacccagtgtacggtagcagcaaacaagagaaaacacttaggaacaacctaaccggcattcaggacctctgtggcccaaggggaaagccggaaggacattgttggtctaacggattgcagagctactggcatttttggcattttagataaatctattccatcggtatcatgtttactgaggtggataactgcatggaggttctgtgagagaatgttcttatgaaacgcacatgggagcctgtgacagacaggcccgagcaatacaaatgtcctcaggtgggacagaacgatgtggtggagagaagagggcgtggcagagcccacggggcacgtgtcagcatttgctgggtccacggggacagaagggaaaggctctgtgctgctgggattcttgcagtgcctctccgcgtttggaactttattccagtgaaaagtagatgtgtgtgtaggccctgaatttaataaggtctacaatgataatagttaaatgaagcatgcaccatagattcgtgctgatggtayatgaatttgtgtgtggtgggttaaattgtagttagcaagtttgtgtatttgtttacgtaagtctttcttcttgttccaggtgaatgaaaactttgccattgatttsatagcagagcagcccgtgagcgaggtggagactcgggtgatagcgtgcgatggcggcgggggagctcttggccmcccaaaagtgtatataaacttggtgcgtagctggccacctgtgcacatgttagggcagcctgctcgtcctcatactccccttcactcccagtgcctgttctttctgtcctcttctctacctgctcccgaggcggcccttacggggttcacactgctggcacattcaccctacagcgccacactacagggcctacatagagccgcctgtccgaaaaccccctttcaactgcgaagtggtgggcggcatgtttctcttctcggacgcccaagcgtctttcctctctgggcccttctcggtttggtcatcatctcagctcaggctgccacacacagcaccgcaggctggggtcgaaaacaacaaacacatttcccacagcgctggaggctgcagcccaagaccaccgtgccgctctgtgggttcctcctggggcctcgctccggggcttgcagatgaggtctcctccctgtgtcttcacagggccgtccctctgtgggagactcctcatcccctcttcttataagggcaccaggcagattggctcagggcccctatgtgacctcagtttaccttcatcacctctttaaaggccccatctccaaatacagtcacatcgggggttaggactttggggggcacacggtttattttctaacaatccctatgtaatcttttatgcctgttgatgagtgtcatatacaggaccattgagaaaaaaaagaacacaggaccggagaaagagaccgtgggctgaagctgggatgtggaactggggtgcagggtgggagggaggctgccacagatcactcagggactcgggcggctgctgacctggggtgcagggagagggggaggccaccgaccgtggagcactcagggactcaggcggctgctggggttggtgttctccccaaagcagagtcctggttaagggactttaacttcgttagagctgacatttattaaaagctgtcattatcttgttgcctgtcctgaaaaggggacagtgtaacaggcataaatggttaagcagcctagagtgggactgggcacccggcatgtcccctcctgggctccagccctgaaggccaagcctggttgtgcctcactgtcgtgtgcagcacccaccgcctgctccaggccgctgaggtgtggggagtgaatggagctgcaggctgacagtgatgtccctgggggtcctaggggatggctgcgtagcccggggtgggagcctgaggccaggggcttcggtcagcctggaaccgagatygacagtctgcattcttacttcagtagtaactgcgtatttttgtttctgacagtctaagttttatacatacattttcaatgcttaatatctagatttgaagtagaatatggaaatatgacatcattcctyttgaattttttcaggacaaagaaacaaaaaccggcacatgcggttactgtgggctccagttcagacagcmccmccactagagcgtgtggcacgccgggggtcccscagcatcctgtgagcatttccrcggggaagctgagcacgtgaagctcgctggttctgtgcgaagggtattcctggtgctgaataaagggygttgctgtcaaggctgacaatttgtaagtttgtttctttcatagtctgggctttggaagtgaacatccacgtggacatgggtagacatgcgagtggaagcagtgcccgctccagtgagcctgagctgcctcctgccggccgctgcctgccttaccggctgcttctgtgtgtctcctcttatccttggggccacgtgggctgcaggaatgggcggggggcagggaaggagaaggagaagtgcctcttgttttgcagatgcaactgtgcttcagagagccaaggtgggtcttgaggtgcatagtgaaggagggtgcccaggcctcaactggtcctatgggaaggtcagcctctctcctgttgctggcttgcagagctggtctatccgtccgtcctagtccctatgttgaaatgtcagatcttaaaacccaagaatttaagcactggtttgaaggcatcgaaagtcacatactggccacattaaggacagtctatgtttttaaaagagtaaggattataatgtagtgtaacataaaaataaaagtagattttgagggaagagaaaggagtcttgctagaatgatccaggagtctggcctgtgagtaacgggaattccagaggaggaaataccagagcagagggaaggtaagagggaaggygagacggaaggtgagwgggawggcgagagggaaggcgagtgggaaggcgagagggaaggcgagtgggaaggcgagagggaaggcgagagggaaggcgagagggaaggcgagtgggaaggcgagagggaaggcgagtgggaaggcgagagggaaggcragagggaaggtgagagggaaggtgagagggatggygagagggaaggtgaggcagaaacagcagaaacacatttcccaagccaaagaaaaacccacagatcacagggctcaccaagttcctagcagtattggtgagaaaagacaactaggcatattctggtttaagaaaagaaytaagctgtaaactttagagtctagaaaaaagaaaaccttttaagcgcatggatgaaaacaaattgtagtggaaaagtgatcagcgatcaggtatccacctctttgtctttgatgctggaggctggaagagtgaaacattgtccacaatcttcatgyataaccaaagttaaattccttatcctgagaggaagacattcttggatgtgggagagttcagaggtcatcatcctggaccccactggggaagataccttgaggagaaggccttacccagcagacatgatcacagccctcggtgtggggagggaggctgaggcaggagcggctgctagtgggaaccagttcattccagtggcacgctacccagacatgcgtgtgaggccatgctcccgggctgcagggacagtccaatcatgttgcccttggtgctgagttgggaggtctgggagggggagagggaagaaggggatgcaggcatccaggaggtctctgggttgggtgggtggaggtggaaggaggctgaagctccctcttggagtggcgtgaaaacaaaatggagacagatgtgatggagtacattgatgccacctggattcgaaataactgtggcgacatctgtgagctgtccccgtgagggcccagagagggaagagcagcaggccaggaaactgaaaatgtggatgcagaataaccagggatggggagaggtgaaggggtggggccaggggaagggggagagaagggaggagcgaggactcagagccaggagccaggccagcccctgggggagccactggtggagatgaggccccaaagctccaccctgggctacggatgcacccccgccgtctctaatataccacatgcttgtccttcatctgttgggctaccatgctgcttttctttacaygtgttgacatggtgagtgacgttagtcagtcctgcaygttccaaggtggacctgagtgtaggggcaagtcttgcttttaattcccctttaaacactgtcctccttgggtcttcgtgtcagggccgtgctcactttgagttgggaaactgcccacrttttctgttctctggaagagaaggtgtaggattgggattcctgtttcttgcctggtggaactcgcaggaaagtcttctgggcctgggtttgttgtgggaaagtgggtatctaagatcaagtctccttgagtagttacaggacgttcagccttctygagccagtgttgtagattgtgttttttctaaaacttggactctcttgccgagactttcagagttttactggcatggagatgaagctcaagtattttcaagatttttcagtgtctcgggttcacagtgacaccctcttttctaatgttcgtctgtgcctttgttttttcctaagtctcaccagaggttgtcagtaacatttgtatttctaagcgaccttcagcttggygatccactctgttgtatttttggtttctacttaatgtctgctcgttattttcagtttctacattcttgctgtttattttactgttctgtttataactttctgaggtgggttaattattttgttcccagcttttcttcttttcatgtgtatttcatgctctaaatttctttctaatctctgtttcagctgcatttcccctaattttgtaggttattttttcattaccattcagttttaaatatcttacaaaagcgtgtttattaaaacaaagtgtatggggtttacacttttatgctgatttgtattgtggtctgagaacatcctcagatgagttcatttgtgggaagtctgtggagacttgttccatggtccaccacatgcgtttctagaaacgtcttgcgcctgctcagaatgtgagttcttcgggtttcagtgcaggctgacccttgtccagacctcccactgcgggctcccagggcccctcccagagttcttgctctcttcttttgtgcctctttaaagaactacctttgaggctctgctgatagtgtctttcattttaaaatggctttatcttttcactgaatggaatcttttaacaacttgctttcaagtctgttctgccagcatttaactgggctctgctggcttggtctggttacctttgcttactatgtttgttgagtcctttcacctgcatcttaatgtagactttgcttctgttgcatctcctatgaaaatatagctgaatatgtgctaccagtttaaaattctttgtctcttaccttgagattttagtccatttctgtctagtgtaattgctggcctgcttcagtttcaagccgccatctgtcccagctgttccatgctcctgtgtctcctttgtttggcagaattattttatcattctctttccctcctaatactttagaagttattttttcttcaaaacagaaaagccacatacaaactggagaaattgttgacaatgaaaataataaaaaaatttctcatatagcaaaatataggtcataacctatattaatcaacattaaaaagacagctgcctttgagggaaatgggaaaaagcataaagatagtttatgaaagaggaagcacaaaggccagtggtcatgtgtaaaggcaggtgttgcatttccatgatgagctgatgtgaggccccgtgggcaaagcagtataaggagcggctctggatgtctgggctgggggtcagttgtgcatccagaagtggagggagcatcttagtatcttagtattggaaatttatcctaaggagttggttgtcaagtgtgaaaattatacacaaagctgtcataaaaggactgcttatggtaggcaaatgatacagaaatacaggcctgattaaataggtttctttttcttctgcttaattcaatgagatagtatgaatccattggaaataataatatggaccaatattcattgatgtggaatgagtatgttacatacggttgcattaagaaagcaagtaacagaatagttctatagaatgcccactggttgcggctgtagttgtaacttgtttgagcattcatgtataaagaggttcaccaaaacattgactgtgattctgggaatgagatttgggtgatttttactaccctttctgtactttttgagattattataataaatgtgtcacggtaaatatgttttccatacaaaattttacatggggaaataatattcttatcaatgtaatggattgagaatttcagagaagaaaagatctaatattactcatgaagcagaccagtttcagcttctgttatttacaaaacctacagcagctatgttcacattacagcatccaaaatttgtcattctaatctgtgtccttagacctgttcacagaaacgatatgtcccagctgcaatctctaaggtggatgcacagggcagctggccactctcagagccaattaccctgattggatttctgcagcaccctgaggaacagctgagtcagcagcccagccttcccctgcagagcgtctgcactcgccctgggtcctggaggtagagagcgggcaagctctggtttttcaaccatggtgcttcttgctccgccaggaaatagggcgctggctgcgccaggggaggcggctgctcctgtgccagcttgagggtcccgtctcttccccactcagcctgcctttacctacacatgccagttccaccaccacacattccctctgcgtggctcacttagatattacggaatcttgtcccagacagtcctcctacaaatactaccaactgagttagtgttaggaagttaaaacaagtttcccatggaaaccacattccagctcttgcttttaccttcctgctgggaccggggtgaccaggaagctggagtgagactctggggccctgagggagagccctcaccacagctgctcaccctccatccttttggggctgtaaataaatgtttggctgactgctcaactcccacatagacccgtgttgctgttgctccgagctgacttgaagtgtgggggctcataactctgttctcaatcctgcaggtggagtttagccacaggtggcccatgcattctgaggaagtctctgtgtttcaacttaggacagacccccatggctggcctggcggggaccctgcaatggaacatgaagctccctgagctctccctgcttcttcatctacctggccctgagggtggggggcggtcgccactagtcctagagacatggggggaggagtgcctattgttttggttttttacttgctttgtatgtgcataccaaacacctagttttatggaaaatcagatacatttctccaatcctgtagtaaggctgaagtgtgggtattacacatctggtagtctaggcataaaatgaatttggaaggtgtgtgctgatctcctagggctgcctaacaaactagtgcaaactgggtggcttcaaacaataaatccactccctcacagatgcctaaaatctgagaccaaggtgctgacagtgccctgctcccactgaaggctccaggaaggtcattccagcctctcttccagcttctggtggatgctggtgtgcttcatagtctttggccttccttgactgtcctcaacattccttggctttccttggccattctttgcttttcttggtgttccttggccgtccttggccttctttggcgttctttggtcttattttgccttccttttatttccttggcgatccttcatcatccttggctgtccttgacattccttggccttcctttgctgtcctttgcttttcttggtgctcctgggctgtccttggccattctttgaccatccttggcattcctgggctgtccttggccgtcctcggctgtccttggccatctttggctgtccttgacattccttggccattctttgaccatccttggcattcctgggctgtccttggctgtcctcggctgtccttggccatctttggctgtccttgaccttccttggccattctttggccctccttggcgttcctcggccttcattggccatccttggtgtccttggcctttgttggcctccctcgtccttcctcagtcatccttggacttccttggcattctttgctttgtgtcttcatcgctttattctctgtgttcgtctttatgtggccttcttcytgtgtgtgtctgtcttcatatggctttataatagacaccattcattggatttagggccctccctaacccagtatgacctcgtcttaactaaatctacaaagacctgatttccaaacaacatcacattctgaggttctgagcaggcatgaattttggtgggccgtacttatcccagtgtgggagaccagggtgtatgtctcaacccttctcactagaatgcaaacaagacccccagtttgcaggtatcagacgttcacagacttggagcctgctgaggaarggggactggaagtctggagccaccaacctgtttaaggtacttttaactgttttccagagtaatggtgacctggaaaggagaataattagactcttctatgacggctgaatgttagttctgagctggcactgatgccaggggacccaaaacaccacggtggcctccccttccgtccctggtcatgttctttgctccaaagccttcactatctgattcgaggatagtagctcttgctttctttggttaatgcttgcctgatgtgttattttccaccattttcctctcagcctgtatacatcctcatatttgaagtgagtttcttgtacacagcacatagtttttctaatctactttttctattttttttctattttttttttttctttgagacagagtctcactcttgttgcccaggctggagtgcagtgatgccatctcggctcactgcaacctccacttcccaggttcaagcagttctgcctcagcctcctgagtagctgggattacaggcgtgtgccaccacacccagctaattttttgtatttttagtagagacagggtttcatgttggtcaggcagttctcgaactcctgatctcgtgatccgcccacttcggcctcccaaaaagtgctggaattataggcatgagccaccgcgtcagcccttttctattcttttcattgatgtctttgtactgtttacattgaatgcaattattgatatgttagggcttacatccacctttttgtttttttgttctgtgcttagtgtttcttttaattaattactttaaatggacaaaaaataattgtaaatattcataggatactctgtgatgttttgatgacacacacagggaaggattcatacctgtggtgttctgagcgtctctgtgtgtgggcagctctgggagttatcttacacatgggcatatacggcttcctgatgccaccttagtagggtttgaggtgtggtgttgcggcctggcggaggtggagtccaggctcccccgctggcctttgctggcgtgggtggggtgcagtgtggcccctggtgactggctggatggagcagttcccatccggacatttctcatcctgttatactgctcattccctgggtctccggccagagacagcaggcttttgcaggacatttttgggggtyggggggtgcggtttgcatccattggtctttctgtgttgctggcttcttcatctgtcagggatctatgaggaaaaagcccagggctccccagaatgccatttctcaggttccaagcccagcggggctgcctcctcccctcctctcagagtgtctgtcttgtgcttgttttttgtgcagggtccagggttcacggttgcacttagcaagaggcatggggaaagctcatatcctccacattctgtgagcaaaagacctggccattcactgttttggtttttgtttgtttgtttgtttgttttttgcgacaaagtcttgctctgtcacctaggctggagtgcaatggtacgatcttggttcacagcagcctccaccyaccgggttcaagtgattctcgtgcctcagcctcccgagtagctgggattacaggcgcgyaccaccacgcccggctaatttttgtatttttagtagagatggggtttcgccatgtcggccaggctggtctcaaactcctgacctcaagtggtctgcctgcctcgacctcccaaagtgttgggattacaggcatgggccgctgctcccggactggccattcacttttaaaggaaggaagcatagacttagactttgctgtgcctggacttcttggggatgatgaaaggtggctggcaggtcaggggcctggtggaggcaagagcagctgacctgggagaaggtctgagagggtgtcctgtgtgggcaggtgcggagcgtgtatgtcagctgctgagggatacatgggaccaacagggaggtattgttcaggtgtgggctctggccccctagcctgcaccgtggcccctgtgcccgggggtcactgaggcaggggagcaagcgacgcatgtcctgatgggggcgcccttcccggcctgatccagctgaaccgcgccacgggtcccagtgcacttgcagcatccccagcactcctgtgaaccgcagaagcctcacctgtctccagggaccacacagcattgctgacgccgagggccccatttcgaggcgacgtgcacactctgcagaagcgtggtcctgcggtgtcccctcccagaggcaggcgggatgacaaaggctcagctgaggtgtctctgccccagacagtggcactgagttgccaaacattggattcaagggcctgagggtggggagggaagcaggacctgcccttcttattgccccatctcgggacacacttggagtttgtgcttctcatttctgcagcctcagctgctggccccctagtcttgcttccgccccgtacttcagtgaggcagccatggagctgcagttgtgagggccgcctggccactttggagcccttgtgctggtgggcagaaggcaaagaagagagctgcttaggtggggcggggcggggtggggggcagtgacagagggtcctgtgaggacctgggcaccgccaggtaaggaggtgcctggagcccagcacgtgtctctgctgccacagtgatgatcatgggtacctggggaccaacagtggccgaggcccagcaacccaactctcaggggtgaagctggttcccccacccggcaggcgatttctccggctgagagtggccatggaagatgaggcacgctactcacaccacatggtaacctgcagccgcatgcactgggaggccctgcagagcctcctctgctagctctctatggtgccgtgacctgggaggggctctgggcagaacagggttagtgccaggcaggaggaaaccaacaagggcagcagtggactccagtggccacagctctctctcgggccccagcttggtactgctgcccttgggcttccccagttgtccccaggcagtgtgtccccctctcccctgccagtgctgggcgctccagctcacggctcggctttgcaaggtcagggcccaagacgtccatgggaacctgcagcacctgcttgcttaccacctgcccgcttgcggccaggaagcgtgtgtgactgtcttggcagtggcattttcctttgtcccagcactggttccgcaatgcattttgtaagggtcctccaggggccacctggggagtggccagggcgatagggtgtcctctgcactctccgttcctgggtgctcagggcatcctgggggtgcctgcctctgcccggctctccttgcggggaagccacactgaggcaccgacactgcccgttgtgaattctgcgaccacttctggtaagttctcaacaagtaggcgtagcacaaagcaagcattcgtgttctcagatcccaagttgtcttttctwcaaaagccagtgacaatttagaaacggagaaagtgaccttgctctccaagaagcaaatgaaaatagtgggagcagcatccttgctggccttcttagaaagcagtgtatgaatgtatcttctcatgctttcaacagtcaccacaatttaaaaaatacagtatcaggagaactaaactgacccagktgattatgttgaagcatcttttttttttttaacttcaagttcttttagcaaagtgaatccatattccacctgattatgatttattccaagaaatcaatcatctacgacggatgagctgagcaggagatgtcgttccagagtgaattaactggtcaacagtcaaccatcgttttccattttgtgtccagacccrgacactggtggttcccagccttgggtttcagaggtcagcacaaggaagtcaggaagcaagtttcctcctgtggttgcttctgtggccagggaggggcgtccatctgggattctcatcctgtcacacaagcatggcgtactaagccagcaggcagggacgccattgcttctgaatgacggttattttcagggagggacccttggcagtcctacaccacccttggtcacaggtgtgtttctggttctgccggcagcagcgttcaggagaggggtggggcccttagaaccaccgcccaccccagcaaacctggccccaaggacggcctcgccacatcagcctcacggctccggggctgtctccaccacgagccagtgtccacagtgcccgctgacctggggagtggcttggcttggcctggcctagaaaagaccttgcctggctggaggccccacctcaagggtgacctcctgggtggggaggaggtatgccggggtgctcccagtgcagcatgtgtgactgttcagcctttctcccaagacggagccgcccaacctttagcgtgtctgcttccagatggggaggcccagtccctgtggaagtgactgctctcccgcggcccagcctcgggaccctcccgtcagccctctccattcacgctaaactgcgctgttcctcaggctaatatcaccattacagtactaatttattagacacagggagattttaaatttcattttagtgcagttatttaaaatttaaaacgataacgtctaactcaattaaatttcagttgatttatttaaagaattgtaaatgcacgaagtctaataacatgagtgagtcataagaactctaagaacagcttcatctccatgtaggggacctgctttcgggctggtcttgtcaggaggtaacagtaagaaagattcaaaccaggcagatccgggattgaaaactgatccagcctcaacttcctggactattttttatctacctaaacttctcatgtcttacaataattacgttttcttttttacctttctttttggggatttctggcactttcatcatttagaggctctggtggaagagccagctagctgttcaccactgtggagaggactttgaaggcacgggggccacgcctggcatcccctgccccatcacgctcctcgcgtggagctctgtttcccagcttgactttgtgcctagatgaaccggctgaaggatgcgtgacttgactgcgtagatgaaccggctggtagcacactgcggctcctcttatggaaacatgctcctggccctgtggcctgtggggccccccctccccggatgttcgcatcatctcgccaggtcagctcagcaatgtcgtctaacagccgggactgatgtggtctgcatggctgagccccccagatccgagtgttgaaaccctcggtggggttatgaggaggcgggtatgaagtggtatgaggaggmgggtccctcaggaatgggattcgtgcccttataaaagggactccagagagcttcccgccccttccacaaagtgaggacacagcgagaaggggctgtccgtgaactcggagctctcaggggacacgaaacctgccggaggcctgatcctgcgtgtcctggggctctccgtgggcatttcctgtctgcgtggagaggcacagccgcagcgggagccggagcaggtggtgtgcagggagaggcggagccgcgcgcagggaggggcggagccgcgcgctgggaggggcggagccgtgtgcaggaatgagaggggcgggagagcccgatttcactgcttgcgcccttggatgctgcttgagcccggttgtgggttctcattctgttaggcagattgggcttggtgtttatcccattcactggatggaatcctggtggactgaggtctggcccccgcttaggaatgcggagatgggagcaggttagtcctgtgctggctccgaggtcgccctgaggtcgcgccctgggctgtgggctgccccagctgcttgcttccaggagcaccattttcccttgcaaagaaaggacgccactgtggttattgcacgtggctgtcgccagacgttttctgaagccagatgaagtgagcccactactttggggagatcagtcagctctgtttgtcgtcagaacatctgagcattcaaacaaatgctagagtttggggaacgagtatcccccactgtgagtttggcagtttcccaacatgtacagactcctgaggcgctcggtgagaatgaggatgaatgcgacttactcaccttgtgaagtagaatgtgctgacttacggagatctgcttagctaagtgacccagtatctgctaatgaccagtgcaagctgttacaaaattatgcgtggttaaaagagtcaaagtgcactatgaggctgggcacagtggctcacgcctgtaatcctaacactttgggaggccgaggtgggcggatcacctgaggtcaggagtttgagaccggcctggccaacatggtgaaaccctgtctttactaaaaatacaaaaaatagctgggcatggtggygcgcgcctgtaatcccagctactcgggaggctgaggtgaggcagaagaatcgcttaaacccgggaggtggaggttgcagtgagccgagatcgcgccactgcactccagcctgggcgacaagagtgaaactccgtctcaaaaaaataaacaaagtgcactatagaccagtggagtttaacacaatggaatatgaagttcactggtatgtttcagattttatttttgggaccaagctttaggaaactgtaatttgttgagttttagtgtaatatcaaagaagaatccaaattctcagaaaatactataaaatagatctttcttttccaactagatatctgtgtgaggctggattttctttgcctactccaaccaaagcgacacatcacagcagactggatgcagaagcgtgcgtgggaatgcagctgttttccatggaaccagacgctacagagactgcaacgtgtaaaacactgccattcttttcattcctttgaataatttttttaaaatttgctatttaacacgtaatagttttttattttaaaatgaattaatacttttttttttttgagaaggaatctagctctgtcacccaggctggagtgcagtggccccatctcagctcactgcaacctccacctcccagtttcaagtgattctcctgctccagcctctcaagtagctgggattacagggcaccaccgtgcccacctaatttttgtatttttagtagagacagcgttgaccatgttggtcaggctggtcccgaactcctgacctcgtgatccacctgcctcggtctcccagagtgctgagattacaggcgtgagccaccgcgcctggcaataaatattttaaatgatcggttttaattctaataaggtaaatatcaacgcacattgcccacataaacagaagctctttagggtcctcagtaatatttacaactgtaagggatgctgagaccgaaacccttaagaactgcagctttgaagatgtgtttgttctcttgaggagattttattttgttcacttagggacagttttcttccccaattatatacatgtttaaaatctacaaagcatttgtgagaacacttggccagggcgagcaaaatgtaagtatgtgttaagtaggaaaataaataccttctaaaaatgtgcagtaacgcattggtgtcgcgtaatttccttgaagatgttgattgtcctctgaactcagggttataaggggatttctctgtgtttcgtgggacatgcctttttattaaatggagttctctaaaaatcacatgaagcacgttgatagcgtccatgtttttgacagataaaaagaggaaacgtctgcacactgtccatttaaaccagggaagggctgtgtttggtaactctcatattgaccatcatcttcagtcaaatgcattccactgagtctttatacagtctcactcatgttcttctcatctggttaacaattagcaatgcattcatttatttcatgtaaatgttcaaaataaaggtcacaatttatttcccccaaaacatgtgagtcgtgatttcatggtctggcatgtggttctgagttactcttgatatccgaaaactttgttcctaggccactatttgcattgctataatacctgcatagagcttcacagagaaaagcaagttcacgctgaaggtggagattcaccagaagaaacctccacaggcaccagaagtggtcccaatgcccttggccctcccctccccacccctcctctcacttccccctcctccacttttcctccctcatccctccttctcttcctccccctcctcctccccagtgccggcagaggcaggctacagccctctccttccctcccactctctgtagccacctctgcttccttctccatctctgcggctctttctaatatgtgtggacctgacttctgggcgctgatggaagcgctgcgtggacgcatcagaacgaaagccagacacgctgaccatttaaagcagagtgcgttgttttcttggaatctgggctcccaggaaggtggccctttccctgtgctgggcgacagcctcacctgacaacccccccagggccgactgctccctgtcttgtcatctcttcatgggacatgtacttcggaaacaaatgtccagcacagtcctggtggagcccagcagttctcatttctcgccttcattttcctgggtggctcgttattttactgagagtacttaggggtcgttggtcgtggtgctgcttgcaggctggtgtgtttcagtgtttcctggcctctcccctgagtgcggggacgggaggcactttattagtgtcactgattttgctgatgtttctgttaatttaattttattatatactgttgagaatgcctttttcctctgcaaacacatttgcatactccaagtgagttactgcgccctcattaatgaatggagcttgttctgccgtgagaatggccgtggagcgccctggaggtgcccggcccacgatgggtcgcttccagaactgtgtgtgcttgcgccagtactttccactccctgtgtgttttctaataggaaaagatgtcacttagtgtgagtgaaattccctccaggcccaggcgaacattccagaaaggcatcttccctggtgctgctggggcaggggagatggaaggagatccccagagggggcctggggcctggggcctggcgctgtggatgagaggcactctggggctggctgtgctgaagcagcaggagcaggtggctctggaaagggatttggaggggacaccctctccatcctctctgtgcccctccctgttcccagcccccttcccccggctcctcctcctgccagctccttgctgggctgaaccttccctgcctccggcctctgtggagaaaacccggtccttccagcttcttggaatgcttcgggcagctctgggtgttggtgtctcatctctgtctggtcagggggacttgagaatctgtccttgaggcccgcaggggtgctggggctgcctccttcctgagagagtgccgtctccctcgggagtgggctgtgcttccactcctgctgttgcaggggcaccaagagggctgcttcaggagtcaggtcaggagggagatcgagtcgctcctcaccctagagccatcatcagctctgtggcaggagaggatggcacctctgtgtgctcaccatcaccagccgcagggattccgggaggaggcatccaaagggaaacttccttgctgttttccttccttctcacttaaaaggcacctgcggttccgagagcctattacaggcatctgtttccactacacgggtgagtttgtaaccaaactgtagtgtctgaatcataaaattagttatttctctaaaaaaccacaatcttccaaaagctatgtttagaaatacttaaagtaaatccctatgagaacaaaacaaaacagagtagcttgtttgtttaaagtagccctcatcccacctgacttgggttcacacttcctggctagaccgttgagctgtttgtttacgtgatgagagcccagacccccaagaaacctcagaaaccccccgggcacgcccagggctcaactgaaggcaaaacgcaacctgcacgtgccgcggtgtgagcagtgccaggagcagcgataaactgtccccacacaggacaccgtgtgcttgaggccaggaacacatcccggtggccccttctgagtacatctgacccatgttcagaccagctgcaggggcctgcccagcccaggtgtgaacaaaggacggtggcttctgatctccgctgagcacctcgcgctgcaaagactgtgaggacctggtgctgggtgttgcctccgcctcctccggccacagagcccacagggcatgggcgtgagtccctgagagcagagcctggcgccaaagcccagctctgagaaggaatggttgggaggcccccatggccaggagagccacgctggcccatttgcacacaagtcaaaaattggagctataggtaaaagtgacagcatcgtggactggtcccatgaccgcacctgcatctgcagcagccccactgtgatggcggggacctccttactaatacgaagggtctgctgcagccccactgtgatggtggactgtcttactaatatgaaggggcacaggtggggctttgaactcagcctcggttgaacccctccgaaggtgaaattcctggagtccgggctctcgggggtgtccgacgtgtgaaagcaactcaaaggcccacagcacatcctcatttccctgctcaagggctgtgctgattaacctgaaaaactgccaaatgtggtagaaaaggctggagttgagaattggagagttcatcaccgatcctcatagctttatcctaaagagggccccagcctcttaagttgcatgcgtacactgaattttgtggctcacccgttggggcctggccttctcagagctgtgggatggactaggggtcagtggccagcgcagcctgggttccatttctgtatctgtcatgggcagaatgacgccccccacatgcatatgtttaggtcctgacccagtgcttgagaacctgactgtgtttggagacaggccctctaaagattagggtgggccctgatccactaggacaggtgtccttctagaaggaggtgaggacacagacaggcacagaggcagaccctgcaaggacacagggagtctacacggtcaggatcgaggccctaggaggatccagcccagccgcaccctgaccttggacttccagcctgggggttggtgagagaagcccctcctgtggcatatccttggggccgtgcctgctcgctaatccaggctcgtgcgccctgcctgtccctccgggtggcttcccgtctctacccaggccccctgctgcagagcccacctaggaccagggaggtggcagggatccaccagtgggccccggagccccttcctatagccctctgtcaggcagggatgtgggaccctccacctcccggctgctccctcttctctgccctgggccaggcagtggtgtctcccccatcaagttcgcctttctccaagtcactgctgggagctgctcctgcctccctgggcgtctgcagagctggcagggctcccaccactccgggcattcagagcttcttaggcctacctctgccgcctgtgccatttcggatgcggggtcaacgtgtacccttctttgcaccttttaaagggtccagccaggacacccgccctctcgctccacctggcgtcttggagttctggcttgaaacccagttgaggccctcagcctcgtgcctgccgccccggcccatccatgtttccacggtggcagaggtgattctggaaccacaggcagaacagcgttttcttttcctgctgaagatcggagcaggtgcccctccctccaagtcgtgggcgtgggtttgtgtctggaaggaccacacagcccggttcctctcattcctgagctggcacctccgccgcccgctctgcactgggtctcagacacctgcttgtcctgcagccatcagaggggattaaaattaacagcagctcggacgtgaggggagacgggcctcagacgctgcccccgcccatggttaccctctcacagcgggaggctcacaatcaaattctcacaaaaggtcacatttgcaataagtaaaaaggaaatgcaggtaattggttctggagactgttaatacctctgcgggccctgagaggcgatctgatggagttgaaacctttttgttcaggtaattaaaaatgagatttcattatatcttttaaaatgagggcaagtgaagtgttttctcagatgctatgatgttattgaaagaggaaaataaatcagcaaggcatggcacagccttggctcataaatggatcatggctccgtcccgggctgggggtgcccataggagaactcacccacaaccccgaaccctccgggcagagatggagcctggggcrcagaacagtgtggaccccacaggttccagagggttgggagcgattagacccctcgggatgaaatgtggatggagaaattggcagactgagattctaaacaagtcacaggcagcctcttttccagtgcgggagattatttgtagacactattacgaggtaaatggaagggaaatgagatagtctgccccccggggcctcatctgtccttccccagacaaagggcgaccagtgagggccgagtcttcggagctggaggagagagacagagacgaggggcaggtcagcttgccgggagacaggtgtggcagcagctgacggggctcagacgtggtgtcacgtaatctccatcttcatgacaggtccccagaaaatcacgatgaaaactttgcatcgggaaatctcaccatttatataaaccaaggcgaatgttgcatctaacaataaaatacaggaatgtatttgaatgtttttttgttttttttttcagttccaactaaggaggcatttgtgggtgctttattcacacccggatgggaggacgtggcagctttgtggctggcaggctgacttcccacgttcttggagcccacgttgaggggctagcattgctctaatgtctgggtaattttgaagaaagctgctgcgggtgcaccgggagccctgttgtgcgtcggtgacccctctgtgctgcgatggccgtgtcctgcctttggtcacacagggtcccaatgctgaggctcactctgcagacgcattaccctcacctgagtctagagatgccaccatgggcttccccggtggatttgctcacaaacgctctggagctccataaacctcatggttttctttcatatgaaaaattcttttttgtggtttacaggaagaaaaattctgatgttccagatctttcaggcacattttattggtgaacattattct

SEQ ID NO: 94954 - DNA, 103401 bp, Homo sapiens
ggcaagaccaaaaccagtcccttgggcagccccagaaaagccaaaacattttatttaaagtccccttttctgctttcatccacaggaaaaagccctgataagaagtgtggagtgttccccccacccattccttcatgatatgccatctagggaaaggacgataaacaggtatgccaaatgccataagtttttctacctctttctctagaatactttcttggtttaacatgctttaacttctcacacagattgtcctgtactttttttttttctttctttcttagacagggtctcattctgtcacccaggatggagtgcagtggcttaatcacggctcattgcagcattgacctcctgggctcaagggatcctgccatcacagcctcccaagtagctgggactacaggcacatgccaccacacccacctagcttttgtatattttgaagagatggggtttcaccatgttgcccaggctggactcaaactcttgggcttaagcgatccgcccattttaggcccccaaattctggggttacaggggtgagtcattgtgcccagcttgtacattgttttaaagtcatcatctgtgtggccagaagagcctgcatcttcctagtctggcgtcttgttgacatcaccctattttaagtaatatttcatttaggatttcacttgtgtttataaatgttcacaaaggaaaggcctatgggaaacagacctcataaaattgattcagcagctttatttttctgttccttaatttcttcaaaatctgttagactttatccataaaaatatttgagggagaggtttttgattttttttaacttctatttttttctgtttcttatttagcaaattttggcatgtctctgtttcaaaatatttatttatttaagattataagcgtttggtgtaaagatgtccataaaattattctatgatgttcaatctattttaattatatcttcttggtcattcaatgtttattattttcattttctctcttcttttcattttgatatataatatttgtacatatctatggggcacatgtgatattttgttgcatgcacagaatatgtaatgaccaagtcagagtatttagggaatccatcaccttgagtatttattatttctatgtgttgagaacatttcaagtcctctgctttagctattttgaaatatactgtacattcttgttaactatagacatcatattctgttattgaatgttagaactttttttttttttgagatgaagtctcattctatcatccaggctggagtgcagtggtgcaatcttggctyacgcaactgcctcccgggttcaagcaattctcctgcctctgcctcctgagtagctgggattacaggtgcctgccaccacatctgactaatcttcgtatttttagtggagatgggatttcaccattttcgccaggctggtcttgaactcctgacctcaagtgatccacccgccttgtcctcccaaagcgataaaattacatgacccactgcgcccagtctataacttatttcttctatctaactgtatctttgtactcaataaccaacctctcctcatccttcctctacacacccttcctagcctctggtgtccttcattctactctctacttccatgagattgactttttgagctcccatgtatgagagataacacatgacttttgtctttctgtgcctagcttatttcactttacataatgacctgtaattctatttatgttgctgctaatgacatgatttcattctttttttatatttcattgcgtatatatattttctttattcattcgaccattgatgggcatgtaggttggttccatatcttcgttactgtgaatagtgctgcaaaataaacatggggtgcaggtatctttttgataactaatttcttttcctttgaataaatacccagtaatgggtatgctggatcatacggtagttctatttttagtttttttcagaaatctccagactattttccatactggccgtactaatttacattcccaccaacagagtataatagttcccttttctccacatcctcaccagcatctgttattttttgtctctttgataacagtcattctgactgggataaggtgatatctcactgtggttttgacttacattgtcctgataattagtgatgttgagcattttttcatataccttttggctattcttgtgtcttcctttgagaaacatctgtttatgtcctttgccctttgtttctttgagacgaagtctcactctgtctcccaggctgaagtgcagtggcgtgatctaggctcactgcaaccttggcctcctgggttcaagcgattctcctgcctcagtctccagaagctgggattacaggcacccataaccacacccagctattttatttttatttttatttttggtagagatgggtttttgccatgttggccagtctggtctcgaacccctgaccttaggcgatccacccaccacagcctcccaaagtgctgggattacaggtgtgagccacctcacctggccctttgcctttttatttgagatggagtctcactctgtcatccaggctggagtgcagtggtatgatcttggctcactgcaacctctgcctcctgggtgcaagcaattctcctgcctcagcctcctgagtagctgggattacaggcacatgccaccatgcccacctaatttttatattttttagtagagatggggtttcatcattttggccaggctggtctcgaactcctgacctcaagtgatctgcccacctcagcctcccaaagtgctgggattacaggcatgagccacacgcttagcctgcctattttttaatgggatttttttctttttttttttttttactgttcagatattttagttcattatatattctaaatattactcccttgtcagataaatagtttgcaaatattctctgccattcaacaagttgtctcttcaccttgtagattgtttcctttactgtgcagaagctttttactttaatatagtcccatttgtctatttgtgtttttgttacttgtgcttttgaggttttagctgtaaaatcattgcctaaagtcctgaagtagttcccttgtattttattgtagttattttacagctttgggtgttacattttagtctttaatccatcttaagttgatttgtgtatgtggtaagatacaggggtccagttttattcttctgaatatggatatccaatatttctagcaccatttattgaagagattgtcctttccccagtgtgttttcttgatgtctgtccaaaatcagttggctgtaaatgcatgtgtttatttctggattctctcttatgttcctttggtatgtgtgtttgtttttataccaatacgctgctgttggtatagccttatgtttatttatattttgaagtcagatagtctgatgcctccagctttgttctttttgctcaggattgctttggctattcaggctcttttttagtttcatgtgaattttagaatttttcttctttttttgtgaaaaatgacactgatattttgatagacattgaatttgtagattgctttgggtagtatggttattttaacaatgttaattgttctgttccatgagcatgaaatgtctttccatttatttgcatcttcttcaatttcctttatcagagttttatagtttttcttgtagaggtctttcatttccttggttaaacttattcctggtttttgtttgtttgtttttgttttgcagtttttgtaaatgggattgccttcttgatttcttttttggccattatagatgcatagaaatgcaaactaattttggatgtggattttgtattctgcaactttattaatttatgagatctcaatggttttttggtgtagtacccatacatgaactgttgtcagtctatgatgagatcaacgcaatattaagaataagtgtttaggaactttcacgaaactttcaaggagtaatatctgttaaatctaataaacaatttggccttgtattttgcaaacctttttctttaattttcctagtgcagttatcccttagtatctgcaggttattggtttcaggacccccaaggatagtaaaagctaaagatgctcaagtctcttaaataaaatggcattagtgtctacatataacctatgcataccctcctgtatactttaaatcaactctagattacttataatatctaatacaatgtaaatgttatgtaaatagttgttatactgtattgtcttctatttgtattattttgttttttacaatttttacaaatttttcaatctgtggttggttgaatctgaggatatggaaccaactgtgattaatttttcttatattttaaaaaagttttggttggtgatggtttgaaaattaaaaacaaaacactgttccttcttgcagatagtttgagaaaaaacagcccagattataaattgaaaaattaataacttttggtgaggtcccaagttaaccatgttttttcattttcttagagttcattaattaattagagttcactaattaatttccagctgatattctttgcttgtgttttcactctgagaagttaccattttaccagtcaggttagaagtcaagcagtaagttcagtggaaaaacaagtaataataaatctacttagtgagaccgtactgtgcaaccgactctgcacagagaaaaacaacctattacgtagatatttttattcccattttattcccattttagagatgtgaaacaacttaaccacagcacagagcaagtgtagagacagaaccgggattccgatgaagatctgtctggttccaaagtctctacacttttactacactgttctttattaatcactagatagaaccatacacatattgttacatcaggcagaaggtttcgagggttctattaacaaagtgctacgaatgaactgggtggaagaaagtacataggtctcccattcaagggttcatcagccttcactaaggaaatttaagtcaaagtagctgacagtgagtcagcattttggaaggcaggtagagatggtgaagaaataaggaaattcttctatgagtcatgatagatatttaagcttgttaaaaaatgtttttgactacctactccctttgcctacagagtccagttaaggtatcttaaaaattatggaaataaaaacaatcggtcgctgtctgtcctcgccaaactcaaaaaaggctaagccttttgtgcttaaacacatactcatcagtaactattctaccttacactgaacataactaagctaggttgttcttcttgggaatgtacttgcaagttaatactgcactgcaactataaggttttttaaaagacatcagttgtacattataaattaaatctagtttaaatcaatataattcaatttatcctagcaaggaagttttttaaggatggtctgatttttttttttttacaggaataatctttgcataattttacaccccatacatgagatgattaggattcaatctcaatcagaaaaatccctttatggtgtccttatggctttcctgtatcctaacagaaaaatcctagcagaagcatttcccctttacccagttcctgttctcttatcacagttctattcctccacacycccttcctgctaggcacgggaatttgaaagggcagggaaaaatcggtgaaagtttgtcttctacttgggtaatccaacaccaccgcatccagtagtatataattctttttgcatgtatatcagatcctccccaatccctctcccatacctctttctcacttttctctcattatccggtcctcttgttttccttgacccccacattcctgtctaaatcatcctcctggcctcaggtccttatcgccttcctgagaccctcatgtttagtgttccctcattcctcttacacctaggatttctcctccttccataagggtctggtccttcatccctcccgcttcaccagaccccctcaccctgggagccgccacctccctttccccaagaccagatgtcgcgcggccggacacagccagcacggagagtcgatgccggcgtctgagctgcgcagtggggtcttcccgctgcccagcagcctacaggcgcggtgcactctgggggaacatggccgcttccggtctccctcccgggccggcgctggcctgactgcggccccggtccgtagcactccgccctccgcttctcccgccctgtagccgcgaagactscttcagcctttccctgtgctgcccctgccgcgcgatggagamgagctcgagctgcgagagtcttggctcccagccggcggcggctcggccgcccagcgtggactccttgtccaggtaaccaggacgyccagggccccgcccagcgtccgaaggggatggagaggggccggggacctgctggattgttgccccaattcgcggattctggtttctgaaggctacgccggaattccttccccgggacttgggaaccacttctgcctccctccctggggcgtrgaggctgaggaaaaggaggttaaaaytcgctgcttctttatcgattcctctacctttcatattccgatctcgttttctccccgatggaggtggtcccagttaattactttctcctgtctttcattccctctcaaaccttttttaagacagttccccccgcccccattcttttccccacatttcctgtctttctctgtcactttttccaaaaccatcctaaagtcagtctttcctcctccaccccttcttatgtctttggtttttgggttcttgcccagcccttttctctcttttcatggcttcaccttcttaatttctttcatgcttttctctacactctgattttcttctcgcctccctttttgcttaaatatgtaaataaaaatgtctcctgtgcttctcttttctaaatcttccagctgaaagtcagtatcaaggaatctgagtggtttttatccccagtgataggtttaagaaaacaaaatgagkggtagttttcttccttcttgkgytactggttctccacgttgtcatttctcttgtaacagatgggaattttatcctggaattttgaggaggactttatgcagctttgcagagagcttttatgaatattaactagacgcgttttggatgcagtctttttctttgattttaaaataatgatttaaaaattttttaaaaaataatataagacctgtatttgctttttatgcagccacgatgaaatctggttcttttccactgaataatagtctaattgttattagagagtgattcgataactgctgtgtgaaaacacacaattttcattttctccttcaatcagttgaagtggctctattataattcattttggattctgctaaatatgggtagttattgccttttttcctgttgatgttcagcacctcactggggaaccactgtctgatcccgtcattctacattgccatatgcactcatagctccctgcacagtcgtttttcagagtctttaataagcacactataattgttggcttaaagtgccttttctaccaggttataagctattatacttgagggcaatcttaatcatcttcatatctccagcacttaacatagtctcagcatgtgataggtgctcactaaatggttttttttttttcgaatttgtagcctgaattatccaggaaaggaggatttttctttgcagtttgattatatatattgcacgtttgaatcaagtattttttgaattctgtatttattgctttgaaatttggaaagctgaggattaacatgttcagttgtgtaattcattcagaaaacaggttggaaaattcgaattttatgggaaagttacaaatgacaactatgcctcagaatagcataagaggcaaccagtactytcatccaaggcagagaagttagaaccacatgaagcagcacagtatgttagaaagaaggaagtactggaagttaggaagctcccatgctgaagtctctggctgagctagctctttggtcttttcatttagactttctagtctacagttttctcatcttttaaaataagaagcttgatctagaaaatctgtaaggtcccttggaactctaacattgtcatttttaaaattttaatgacaatactaagatgaatgcattgatattaattttaaagataattcctttgcaaataacctttgttttggatttttgcaattacacgaaataagtgtcctttattattacaaactaatatacctaacggtgccacttgaacatatttatttcctaaaacagaaagcccagcaagtataaagattatatatgtatatgaacttctctataaaaaattatgttactgacaaatttgagaaaattaagtactcctcgagagaattgtgatatagtagattagcctaatcctctctggacaaaaatataagtatgattcctattttccataagagaatgccagctttcattactctcctctggaaggtagaaaagtaacatttacttaatgtctactgtatggaagtttccctgctaaattctatgtatcttttatttcattaatcatcatacctgtttgtggcactctccttaatcaacagtatgtaatagatacattatagacactagttagaaagcttaattttaaacaatctaggctaacacttcatcgcaggtgactctaatacattgccagtgtggcctgctttggtctcatagctatgttaagtgtctatctagattgtttaagttatttcttttgtttcattagcctttgacaaagcaaaattattgctgtttggcctatawtatctcagtttttgcagaaatgattcccttaaattgtagtttatttttatgctttctgtttttatacagaggcctaattgggaaactgcctttggaatttgttttgatatctctggcagaataatagttaatattgttaaatgtgtcacagaatgtttttcacacatgcattaacataaatttctgctgagtttagctacaaagaaaattatttatagaaaaaattatgtatgctccttgtttgttagtaagtggtaactatataactgcgtctttctctttagcttagtaaaactttagtcaaatttatatctgaaggtggtaatatactcatctctaatttctttaagtacttttattattacatgaactcaagttaaatattatgtgttatgtttaaatgtattgattagatgtctgaagcccttttgggaagtaggaaggatgatacactaatccatgtggttgcccattgttttttgaaaatgacatacttggccgagtgccatggctcatgcctgtaatctcagcacttgggaggccaaggtgggaggatcacttgagcctaggggtttgagaccagcctgggcaacatagtgaggccccatctctaaaaaagaaagactttttaaaataagtaaaaatattttaaaaaatgaaaatgacatactccattgaagttggattacaggctgttgtgcaatctgtagttcacaataaacatgtgatgagtcttactaagtatctgtagtcatttcagagttctcttgtctccagttatgccttctaggtcatcatagatctgatgcttttgcccacaaaagggcaatttcattcttcatatgatatccaggtagtagtttcctaaccagctatagttatgtcatcctgcatctttaaaaaaaaaaaaaaaaaagtaatcgtcagctgggcgtggtggcacgcacctgtaaccctaactacttgggaggctgaggtaccagaattacttgaacctgggaggccaaggttgcagtgagccaagaacgcaccactgcactccagagtgggcaatagagtgagactccrtctcaaacaaaaacaaaaaaaacaatagttgtctttggtgagtcctgcttaatattgccatacttcagtaaactgttcagcaactcttgtatatcttgctgttggccattcttcatgtatatctatccccacagaaagagagagggagttgtggaaaacttcactttagcatcctrataatctagttatattctgtaattttacttttgttgggtgtgctctgattcttgatataagtatgactttataagatataggtaaaataatactgtaggtcagatgtgataataagagtaggcttgagtctcagaactgtaatgagttacacagcagaatttgacattatattggtaataatctgccatcttagtctggttttccatttttcagtttatacactattataaaatgcactgctttagtgggtttctttgattagtttgtattgtgcataatcaaatggtaagatatctagtgccgaataggtgctgagtgaacatctaaataaaagaatgttgacggaatgttcaccactggtcttgtttgttgttcccattcaaaggattaaaaargattccttctgttgaatttggcctgaacacttgcaatttcaggtctaagctgaagttatttttatgggagactggacatcttgagctgattttactgttctgtgcccagtcctacacacaatgaggttattatgtcctcttcaactacctatttatccatctgctactcttgattacttttgccccttttgctctaacttgtgttgttagtcgttttaattaatgtgtgttcttgtcatccttcatataacctcaggctttagttattctgggtaccatacttgtttatcccagattatttggttttatcaatttgtagtatataatttcattagcattgatgagcatcttatatttacatttaacttccattaaaaaaatcaaagggggggtacacatactcaaagtagttctcaactaattgcatttataaattgcatgcctgccttaaaattatcatcatttgaaaacaggaattcctagatttctgtttccatggattttgattatacttatagcctgaagaagtagaggagtttcctagatttctaaaacacattttgttgcaaggtctcatctttagttttagcctcaaggtcacttaagagtgacgtgttggaggccaggtgcagtagctaacgcctgtaatcctagcagtttaggaggctgaacagtttgggattgcttgagtccagaaattccagaccagccagggtcacatggcagaacactgtctctgcaaaaaataaaaagttagctgggcatggtagtgcatgcctgtagtcccagatacttgggaggctggtgtgagaggatcacctgagcctgggaacgttgaggctgcagtgggttgtgatagtgccactgtattctggcctgggcaagacagtgagaccccgtctcaagaaaaaaaagtgatatgttggtaggaaatatgcttttatgttgtttttctagtagtggtgatggatttgtgtacaatcacacatttttacccattccctttgtcactcttggcatgtctgctgagacagctggcaagattagaggtagaaattatagctgtaaaacagagtaaagctaccagattgaacctacaaccttggcattattagtagtaccttgtatcaaacattgaacatattagactaaaaattacttatttggatttcattacttaaaaaccctcaaagatctaagttctcttagataagaaacaatattggtctgacatagtaattatgtagcttttcagaaagcacatatttgaagaatgcaagttgatagtgaacctgagactgggtcccgtatatatctgtatttttcctttttatgctattatcaataatttcctattagtgtagaccagtagttctcaaagtttggtctccaggccagtagcatcagtatctctttgggatttgttaaaaatgcaaattcttgggccctaccttggacctaactgaattaacattttaggggtggagcccagctgttggtgttttagcaagctttccaggtgatcccgatggatgctgaagtttgagaaccactgccttggatcttttgctaattggtgccttttgtaatgcaatcaacattagttaaaactaagttaaggtctatgttagaagtactgtaaaactattacttgagagcatttttgtaaaaatgttgactaaagtagtaaaaggtaaaagtcatctcttgtcgatttattagatttgatttctaggaaatttcctaaggcatttttctttgagtaacataaaacaagaatatgcgttttaggctttttcttaaaaatagattcttagtgagaaagattagtggaaacaagcatttttaaaaaaagtacagttgaccctcgaaccacatgggtgtgaactgttcagatccacttttatgtggattttcttctgcttctgccacccctgacacagcaagaccaacccctccttttcctcctcagcatgtgcaacatgatgagggtaacaaactttatgatgacccacttccacttaatgggtagtaaatgtattttcttttctttgtgattgtcttaataacattttttttcattgttagagttcagtatattggcgtgcagcctgaaatatgttttgatgggctgtttatgttatccgtaaagcttccagtcaacagtagtctattaatagttaagtctggggagtagtttggggagtcaaaattatatgcggattttcagctgcgttgaaggtcagcaccccaactcctgtgttgttcaagggtcaactgtattatgaacaagtaattccaggaggccatcacctgaacctgtaaagtttggattatgcccaggggaaggagataacctggatacagatgaccagaaagcagtaagtttattttggaaagctgccaagttaatgctattgtattcaaaatcatcagagccaaagattgcgtgcgattcaggatttgagtaatggaaattctccagattttagtgtggaatatttttcctttgtaaggaagatggttttgaatatgtaaagtacttgctatctttgtgtctactgtttgatttagttaaatcggtagataataattaaacactattagaggtgatagtcaaggatagggagtgattttaaaaacctgctttccacaggaagtcaaattaaaaatggaactgtataaaaagataaagttggtactagattattaaaataaaaaggactagggaagatgccttcttgaaaataataacttcagttccctttcctgtagctttattatgcaaagctaattgtgcctgtccctcctaatatgtttctatataggtaccaatgttgtcattaatacaaactgttaataagcaagcttcataattcttcccttccccaagtacataggacctatggccataatcactggtgaatatttattctttcaaagactcttactttgtgtgaataactcttgggctctttaaatatttttagtctagagtaaataagagcaaatgctgtgtattaaatatattaaaaattacctgtaaaatatattttaattaaaaatttaaacactgttatttggaaaattcttttttttttttaagttctactttaggtttagcagcacataacaaaatacaaactgacagtggcttaatataggagatgctaaatttttttccacatgaaagcctggagatagtcaatacagatctaatatggtggatctgaagtatcaaggacccagattgtcttacattccagggttacctcatgaaccaaaattattgttggaactccagctattatatcttcaggaggaagggaagaagaggagcatactctctctctttgaaggatacttttttggcagtcayatgtcattttttttaacttacatccagttggctaaaacatggatggtcccatggccatacgtaggtaaacaagaggctgggataggcagtctcatctgtgaggcctttgtgctgagctaaatttggaggttctgtcactgaggaataggagagaatgggtattggagtcatagcagcttttccccttgggtacagatgaatcatttaaaagaaagacattttccacctaaagtctgcaatatttcacttatgccagagacacccttagagctgcaaatgcgatgaccaaaatagaaaacacactgaaagagaggaggtaatacattgctgcagaccaaaaaagagaattgtatcttggagcactctgaactcttgagtttagctttctatttttttgtgtcttgtcttgggtcagatttttataatcctaatctggaaccataaaatgaaagtggtacatttaatattgacaagatcattaagtgatggggaaacagaaatcaaaggaagaatggattgccgtgctatattgtatttcacttgaagagctcaaggaattgcacggtaaagtagtagtggtaatgaagttgatggcctactctgcttacttccaatttgacatccatttccaagccatgtatccatgtattttatcctcttctagaatgttgcatcgggttctacttaggtattttctctcatttcagttgtaaggatgtggtttccataagggaaataaataaagctgaccattttaatttatgaatgcttttgccaatattcagtttgtttttatatctttgacctaaacattttattaaaaatgcggagacatctgtgtcttatatattcttttgtcacctaacttaaatattaatattttaagcatataatttcaaacataaggagtttataatttggatgtgaatagaagagcatatgtatataagtctcctttggattgataaaacatttattcatcaggctctgaggatttaatagacattaagtcagaaacatatccatttctcttctcggcagaattgcttttactgatagcagcaaatgagcagttgctgaggtagggaggaggccttgtctggaggttatgcattagcaaaagggaaaataactggctgatgatgggctggtgattacaagccttaatattcttgagcgagccaagaagcccagcaaagttcaaaaataaaattttgttctctgttctctgttaccaatattagataacaacattcttttatcataaccaaaggcattgcctcaaaatagcaacactgaaracaagccttgctttcctagtggtagacagttatagtaataataatgttaatattaaacacaacaataatataaatagcacaacatttattgcatgcttactatgctgggcatggtgctacatttcttctatgcattttctcatataatcctcataactgtataaagtagagagtgttaatgtttccattttacagagaagaaaacggaagattagagagggtaccttgacatgtgaattcaagtccatttgacttcagggtctgtgtgctctaaagaacacacatgcctgaagatctagtgccccaggtgcagaccaaagctttgtagttagagggcagtcccagggcaggttgattgggtggtagtgataaggacatgagtttccttgacctgctattttgctggagaaggataaagatacagtatacattcaccaagtgagagtttgtatttggagagaattttctttacctttgaattttgtttgccttstgacagaaaataggatgtttttttttctttgcctgagattaagaggatagtatcatttcattcattacctgatgattaagagggtagtatcggtagtatcatttcattcaaaagaacagttttacattttgaagatcatgtaaagtatgaagcaagtaattgccaaagcctcctccccaccactccctgccctgcaggctttgcacaatgatttagaatattttagggttccttaaatttctgaattcccctaagttcctttgtgtttatttacagttaatgtgttaagagccattgacatttgaagatcatcagaagtgaagataaaacatctcaaaaattataatgtaagtgaatgggaaaatgcagatataaaaatggacaaaagttaatattgccaacagtatttctggattatatattatcccaaatgaaatttgcacttatgagtaacaagtagtttcaaacttcagttccatttccaagtccctgtccttaaaattctgtgttctcttctacttggggaaagcagtcactaagttttagtcatccagttattttccattagaattcttttggcatccatgttctgttttcttccttttcctccttagcaatttgcagtttgacttgagaagaggatgacaagaattcatgttatatgcaaaatgttatagatactaaggtctttgctttccagctattgatgtgtgttgtgtatgttattcaagtgtaattttactactgttttgtatgtttcttagccaaaaatatgaccagttagttagccgccttccttccccctctttctctattctttctttttttcccctcctctttcccttcctttctttctgcaaataattgtttaacatctactgtgccttacacactgtgctagattctgaattcctaaaagcttggtgctgaaatgaattatatcatcttttcacactcttagagggattagagatcaacyaattagtgtttttcaactgtggctgaggaccacctatgtatttcagtcaactgtgaacttggtgaacatttaacttcctaggtttcagcgtggacattctgaatcattgaggtgacgttaggaatcggcatttaacagttgaagaaccacccatccaaatgctgttggatgctagtctagttccaaaagttttcagatgtggaaatagatctagagaactctaataatttaccccaaagcacaataaatgttagagggccaggaaaggttgtggttttcctctgaggtcatagagctatttagtgtcagagatgatctcctaattcccagttctagactttaccatgtagcatcatgatttttttgcagggccatataacttcactgtatttcctgtctatagaaccctctgcttataggatgtataagattataaccaatccatcactgttcctgaaaaaaataagaggacatatgggttatgtaaatgaaaaacatactgtttcttcatttttagtcagatatgtgactcattctggttttgaaatcattggatagacttggtgaaggaaagaaaaaacttttttttgtatccatgatattatttctacctggatttaagtttcatgcttacgaaaatgaggatctgatttcattttttgagtgaaatagtaggtacaaattttatagtgttttgcaaatagtaggtgcttgataagctatactatgaacagtttactgttaaaacttttcttcatttgtattctgtgaagtacgctagttaggagtgattttatttgcttcatacagaatctgatgctttatataccaagccagaaactttaaataattgaaataattttattgtatttataatactatattttatagttgatattcacaagatctctgagggactgaaatttataaagtatttttgaactataagagtttgaattcgttttagtattgtgtatattttatattgtattatgtatggtatattgatagttactgatttgtaactttatatgagtaaatctcgttatcttaattttggaaatactctgtaattctcaaattactagagagtttaatgatgcaatgcctttttttaatatttcaagacatttttattctatgatttttaaaaaacgtcattttaaaatagcctattgatttctaaaaaattattatatttttcaattataaattttcttttcattaaaaacttttttgttcttttcataaccatggaaacaagattgtacttataagagctctagaaaggaaccttatctattatgtggttttctagtttatgatttctaacaactaatctggtaaatagggaagagtattcaaaattagggagagatatccttggcaggcatggatcactgagtaatgtcagtattttgatttttagcttaacctttctggactacaaagagaaagatgttgaatgctctacctttcctactgagagttttaacttagtaactgaaaaaaaaaaaaacccacctgtgttaacttcatttatatgactttgaagtttgtgcagaaaagttgtatctcattacattgaaagggtagtgaaagattaattgtataataaacagttttgcttgtcttggaaaaacaaaatatatctatctggatagcaaaaataatggatatatgactttctaatttgaataatgaattcaggtttgcaaggtggagtgagaaaattacatgacagatcatttttcaagacataaatttccctgttttctatacttgtccaagtaagtgtttgttgagcaagtgtttagggaatagatcaccttctctcttttagtgtttttgcctgtatactttagtttgggatggaagggttaatttcagagctctaataatctgaccagttttcagtttagtttgattcttctctcagttaagtgatatttaaataactttttccctcttggctacttatgaatctgtgtgttttcatttgagctgtcatctgaatttgaatcggaggtttttgaagagattctgagaagctccttaaacggggtgctgaggctgtgagattggtgctggaactcaaggtccttcctgccctccagtcctcacccctgtctcccagggacacattcattttccgcagaatactttggctttcacctctttatttatttaaatttcccaataagttctttgaagaaacaatactctggagaaaaaacagacatatgtaaattattttctatacaaactggttgttcagactctgctgcattatgaaatcatatgcctgtgttatattttgggaaatgtaattaatagacctggaaataaattgataactgtgtccagggtcacatgtaccttagaaccttgggattttccaaactaagtgccaacatgcaccagttggaaggctgtcccagagctcaaatctcctttgtttctcggaagaatacaacatgttgtctcttatttctgtcaatcagatgccatgatgatcatttatataatcgtttttatcttatgaattggctaagtttaatgcagggttctggcacagcatttttaaacatwattaaaaattataaattaatttgttttgggggggttgtttttctgttttgaggatcctgcaaatattctgacaataagtcttttgtgtctcaaatgttttatacacactgcaggccttttattattttttttaaataaaatcttcaacagaatgactaatagagcatgaacagtgcttatgatactatagtgcattgtgttaagtattgagagcaaaatttgcgttcctagaaaagcttgttcacaatcagaatatagaaggcatgctttaatgttcttgggcaaacatgctgtgtatgtgctcaggacattacttacaagaaaatcactttttaaaaagaaccttttctttttacggaatattgaagaaaaattgaattggcagcaagagtgaaacagttwaaggcaagtggtttagatcttattgtaatgactatggtcagtagaaatgcagcctctcctaaatcttctagaggcatttgtttactaggatatatgaaaagatagatgacttgaagtttccaggttgttttcactttagagtatrtactctaaagtgtatatactctttatatgtttgttcatctgcatctttaattttcagaaatactttttcaattttataaaaaatatttttgttaaattataaatattagattctgttcattgctgtgaagtaccttcaggtgttgctgtgattgacaataaagtaatgataattccattaacactcggccaaaccagtggagccagaaagggtcaatacttttctaacggttacattgaaaaatactggtggtgaaattggttttgtgattgaagttttgggtctgtcttctgattgactatataaaaaatcatgtagggtgtgtgtgtgtgtgtgtgtgcgtgcatgcgtgcgtgtgtgtgtgtgtgtttatatttaaaaaaatttctccccaatatttgtgctttgtattatgtgattcatcagttaactaaaacttgtaagtttaaaagtatgtatattcaattttcctagtgcacatgaagacattttacattatagagctgaatgaaaagtacttttagggcctagtgctttgcttaattttaatttaattagtggatgccttcttaaaagtagacttcctattctsttcttgtatttccacaatgctatttgttgaacactttctaccagttcagtacttaacactaagtactttctatagatcttgctttttgatccttattaaaatattttgatccttattgcaagattttataatgcatcattatcattttataaatagagaactctatccccagtatttagtacattgatgatatcagtaaatgtttgtggaatggaggggaggttaaaaaaaaacaaaataaaggagatttaggaagttcctgctctagagaggacaggagggaagatggctgaggcctttagttagaggtggaagacctcagtctccatccttccgaggaagctaagttggtgttttgaggtgtggaatatttggatgtgatcagtgaacccctgctatctggagacagatttttctgcctttgcagcattaaaagggattcttataagtccagagtttgagtcagaatatgcttctgtagtaggtaccaaacttcatttgtttagacataatcttaatttgaaagtttcttaggaatatttgtaactaaaaacaaaatctacatgaaacaacagcaaaaaaataagtgaagagtgctttgtcttatttattgattctattttgaaaagcatatagagagtaattttccccccccaccaataatgtttgtataactttgttcacctaaatgctacactttgaaatagtagaacttttgagaccaaaagagtggatcattgcttttaagaatagtgtaacaaaggaaaaaaaccctttgttataataacagcagagaaaaaaatgtgtgggaatgactaagaatcagatgatgggattactgttttgatcttatggtggaaagaaaactctctggctgagatggtggcaggactattagaaaaccaaggcagactagtgctgtactatattattctgttgctataaacctaagtcttattatttcataggcatgtgtatatgtatatattccagagtgctggctatactctgataagttttgttgtttttgagaaaatattttctttatcaccacttcattcatttctaagggttccagtttcaatctacgtatagataaccccctcacagcaccattaattgaatagagtcctttccccaatgcttgcatttgtcagctttgtcagatcagatgattgtaggaaggcagcattatttctgggctctctattctgttccattggtctgtgtgtctgttgtttttgtaccagtatcatgctgttttygttattgtagccttgtagtatagtttgaagttgggcaatgtgatgcctccagatttgttctttttgtttagaattgctgtggctattcgggcttctttttggttccagatgaattttagaatagtttttttctaattttgtgaagaatatcattggtaatttggtaggaatcrcactgaatctgtaaattgcttagggtagtataatcattttaacaatattgattcttcctatccatgagcatggaatgtgtttcaatttgcttgcatcgtctttgatttctttcagtagtgttttgtaattcttattgtagagatctttcactttcctggttacctgtattcctaggtattttttttataggtattgtgaatgggatcgcattcttgatttggcactcagcttgaattttgttcgtgtatagaaatactactgactttcatacattgattttgtatcctgaaactttgctgaagttgtttatcagatctagtagcttttgggcagagactgttgggtttactaggtatgaaatatatcatctgtaaacagatagtttgacttcctgttttttatttggatgcttttatttctttctcttgcctgattgctcttgctaggacttacagtgttatgttgaatatgagtgatgacagtgggcattcttgtctttttctgtttcttaaggggaatacttccagcttttacccattcagtgtgatgttggctgtagctctcactattttgaggtatgttccttcaatgcctagtttgtggaaggtttttaacatgaagcgttattgaattttatcaaaagccttttctgcatctgtcgagatgatcatatggtttatattttcagtctgtttatgtaatgaatcacaattaagtgatttgtgcacattgaaccagccttgcatcccggggagaaagcctccttgatcattgtggattagctttttgatgcactgcttgattcgatttgctactattttgttaaggatttttgcagctatgttcatcaggaatatttgtctgaagttttcttttttcgttgtctgtctgccaggcttttgtatcagagtgatgctggcctcagaatgagttagggagtccttcctcctcatttttttggggggaatagtttccataggaatggcaccagatcttctttatgcatctagtagaatttgtctgtgaatccatctggtcctgggctttttctagttgttaggctttttattattgattcaattttggaacttggaattagtctcttcaggttttcactttcttcctggttcagtcttggaaggttgtatgtttccaggaattttctatttcttgtaggttttctagtttgtgtctatagaggtattcatagtagtcactgaggatttttttgtatttctttggggttggtggtaatgccccctttgtcatttctgattgtgtttatttgaagctcctctgtttttctttattagtctagctagtggtctatctaccttaattattctttcaaagaaccaacttccactttccttgatcttttgtatgttttttgtgtgtctcaatttcattcagttcagctctgattttggttatttcttctgctagctttggggttggtttgctcttggttccctagttcccctgggtgtgatgttgggttgtcaatttgagttccttctcatttttcgatatggggatttaaacttaactcttaacactgctttagcgatgtctcatagattctagtatgttgtatctttgttctcattagttttaaataatttcttgatttctgtcttaatttcattgtttattcaggagcaagttgttaaattaccatgtaattgtatggttttgagtgatcttcttagtattgatttctatttttattgcactgtgatccaagagtatggttgatatgaatttggtttctttaaatttgttgagcattgttttatggctgattgtgttgtcgattttagagtatgtgccatgtgcatatgagaagaatgttgtttttgggtggagagttctgtagatgaatgtaaagtctgtttgatcaagtgttgagtttagctcttgaatatcttcgttagtttcttgcctcaatgatctaatattgtcagtggggtgttgaagtctctcactattattgtgtggttatctaagtctctttgtaggtctctaagaacttgttttatgaacctaggtgagctcctgtgttggatgcatatatatttaggatagttgagtcttcttgttgaattgaatcctttacccattttataatgggtataataatataatgcccttctttgtctcatttgatcattgttggtttaaagtctgttttgtttgtttgtttgtttttgagacagagtctcgctgtattgcctaggctggagtgtaatggcactatctcggctcactgcaacctcygcctcctgggttcaagggattctcgtgcctcagcctcctgaataactaagattacaggcgtgtgccaccacacctggctaacttttgtatttttagtggagacaaggttttgccatgttggcctggctggtctcaaactcctggcttcaagtgatccacctgcctcagcctccggaagtgctggtattacaggcggaaccacgatgcctggccaagtctgtttcatctgaaattaggatagcmaaccatagtttttttttttgttttccatttgcttggtaggtttttctctatccctttactttgagcctatatattatctccttattttagtgtgaatatatctggcctactatttttattgctgttgtttttaatatagtggatatgttgtaaatgctgatctctaaaagagttctgattttagtttagaaagatttcttggtaaacaaatatttattgagtctgtgtatttcaccaaactagaaaacataaatttgcttgaaaacattagcaaagaaccagtttttaataggtatgaattaaagatgaatgtgctgagggaggcgtatatccaggaagagtgggaataatctagaaagtcttcctgagaaaattactttkgtttcttagccccgtacatatttgttttttgctctaaatttatgtcttatgcattttaacagtaacttcattttctgcattttagcactgttgtcaattacaggatgccggtcccctttccccagcctgcattttkgtttttaagcagtggtatgtgttgtgttgtgtgtgtgtgtgtgtgtgtgtgtgtgtgtgtgygygcgcaggtgcgtgcgtgtgtgtgtaagaatatcacactttagacggtattttcacatcagagaactgtgaggctggatgagatcattaaggagaggaggagtacgtagagaagataagttcaagggcagagtgagtttaggggcactccagtgttatgaggttaaggaggtgagatggaaccattacaggagacctgagaggattggctagggaataggagaaaaaccgtaagagtatagagttctggaagtcaagtgtggaaagtgtttcaaggaggaaggtgtgatcaactatgttaaatgctgctgatagatgaggaggaagtattaacaggtttagcaaagtggagattattgatgaccttgacaaaagcatttttgttggtgtggtggaggcaaaggcctgactgaagtggatttaggaaagaatgagaagtgaggaattggaagcactgcatatatattaccggaaaggggtcctgatccagaccccaagagagggttcttagatcttgctcaagaaagaattcggggtgagtccatagagtaaagtgaaagcaagtttattaagtaaaggaataaagaatagctasctactccataggcagagcagccccaagggctgyggcttgcccatttttatggttatttcttgattatatactaaacaaggggtggattattcatgattgccatggtacttgagggagtgtagcagtaaggacaaccaaaggtcacctccgtcactatcttggttttggtgggatttggctggcttctttaccgcatgctgttttatcagcaaggtctttaagacccctgtcttgtgccgacctcttatctcatcctgtgatttagaatgccttaatctcctgggaatgcagcccagcaggtttcagccttattttacccagcccctattcaagatggagttgctctggttcaaacacctctgacatatagacatctctttcagtgaattttgctataaagaagctcagagaaatgaagcactatttggagggattaagatgagagaaataatactttgtttctatgctgattagcgagattgagtagwgagggaaaattttatgatgcagtaactggaggagagaattgctggagagattttcttgtgtaaacaagaggagatagagtttaatgagggattttgtttgtttgttttttgtttttttaagatggactcttgctctgtcacccaggctggagtacagtggtcttggcaagatcaagtgcagtgatcttggcccactgcaacctccacctcccgggttcaagtgattctcctgcctcagcctcctgagtagctgggactacagtcgtgtgccaccacgcctggctaatttttttgtatttttagtagagacgaggtttcaccatcttagccagggtagtgtcaatctcctgacctcgtgatccgcctgcctcagccttttaatgtgctaggattacaggcatgagccaccatgcctggcctaatgaggggtatttaatggcaatatggatgatttctccatagtaagagaaagcaaggcagaatatatgtgcacagtgcacacaggttatagttggagagcttgtggaaaatctgtgtttggttctgtatttttgagtgaaacaggaagttagagcatctaggaaattcagggtggagaggatgatacagggtgaagaaagcaaagaaaatatgaaatagtaatctagcagaatgagagagtgtatgaactagagaaatgttgtgtaatatctaggcagtattaagggtctagttgaggtaagcggccatgaattcaaaatgagtccacgctctgtggtggtgttttttttctgtcaactcgttcaactgtgtgggtayggtctggaatagtcagaaagttgrctttaagcagctttccgtgttgacaagtaagtactatgaagtaagcaagggcaagggaacgactgtaataacaggcatggagttttaaaagctgggaaaagcgagaagtgagaacatgaaataggtactctggagtgtagtaggaacagtggaggttttggtgaaattgaacaattcgaagtgttggttgggggtactagagaaaaagagctgatggtcagacagtagagtgtttgaaatttaaattagggagtgattgcagttaattggtaatgccagtccggaggatatgatcattgaggtgaatggctgaggtagaatggaagacaagatcattgcggaagaggaattcgattaactgaatggccaaggtgtttaaatgctcatttatgtaaattggaatcagtaagaattacagcagttggcagcactggaaagaattatggtaagcctgaagctaaagtcttaaggagtgagagagagtgacttagagacaggcaaatgatgtcaacaaagagggtggtacatgctgtagtctgatggcatgaggttgaatacttggggtttttagagacagagaggtagaagaatctgaaagtggcagtgagggacaaggcccagttttcaggcctagtggtgggagaggaatattggagagaaaataaaagggcttatttttctgtctgagaaggctgttggggaacagtgtcctcaggtaaaaactaggctttagtaagcataaaaggtaaaaagaccctttaagaagagctagagataaaggtcattttggtgatggctaaccttaaaattcagaaacagaggaatagggagtgaatgggaggtagaatgagaagggggattagaatctggtagttctgactacttgtgagaactgttgaaaatagaggtaaaagtataatgatgttagcccttacagtttttaatgtggatagttgtaagactgtccatgttaaaatgcaaatgatgttgaagggaggaaagggtaaggttgtgcaagggacactcacaatctggggcttccacttcacttttgctaatggtattggagaggctgacagagagatggaaggacagacagtcttacttcctcagagcacatggatttccaatgccctttttaaactcttgctgatggaggctgggggataaggaaatgggttggcctgtctggagcacaaggagctgaataaataaccaattatatgatataccatcgccattttacatagaaagaaactgagattcagagaggtagaacaccctgcccatggtcacatggctactaagtagtagggtaaaagaaaacgaagcagtctttgtggatgaggagtcaaggaacagtaagattctatgagataatatcatattgccatgaactcttatcttcatttactatcagatcttataatatcacatggattcatactgaattctaagtgggggattagattaccaatccatctttctcatgtggaatgcattccttgttttttgttgtccaaaaactttaaaaatatttatgggaaataggcttaaagatacttactgtctctgtagttcattcttaacctgtttccaaatccagttaagctttatctgctccaaggagcattcccttattggtctcaactgaacttcatcctcatgcattgagtttatataataaaaataaatattggggtatacgtttgtgttatagctccccagttagataataagcactttgagggcatttctccttttagttctgtactccttatcagaagcaatatgagttagtcaaaaggagatccaattctgtatctgcttctctctctctctctggctgtgccactaatttgatactatattccaaaccatttacttcacttctctgggcgatactttatctataaataaggggagggatggggtttcactagaatgatctcagaaatcccttacatttttaatattctataactttctgattggctgtgagaatagttggctactaatgcagtacttgcatgtgaaagggacagttttaaaaaatatttggtataattctaggtactgtatagcttagtgtccttgaaaggtgttggcagtagccaagcaggatcagagtgagaaataaggctggagagagagtgtggggccagatagtcaaatgctttgactagtagtgggtatttgtgaatgtgggactgagaagattaaagatagaaggttgaaaatcatttgcacagagatggtaactgaagatgtgggaattcatgatatttcagagagaaattaagaagagagaacagaggcaaggtgagagctttcaaragaatctatatttaggggacaactrgaagaaataacttagaaaaggagagagtcaaagcaaagctagtaaattttaatgacaagggaagcttagagagcaaagaattccaggagggaggtagtgatgatagcatcaaataatgcacagaggttaaggaaggtgagaactcagagaaacaaggcccctggttttgttcctgaggtcattaatgacatctagaaaacagcatcagtagagtagttgaaggtagagttcaatttgagtgttattaatgattctcatgtagattcaggtaatcaatattgagttcctactaaatgtctggtattgtgtaagtttatgcatgtgagtgtgtgtgcgtgcacacgcacatgcacacacacacacctctcccaaagtagactggatggggcagaatgatgtgcatgagaggaaggattggctttgaacytwaaaaaaaaaaatgttatctacaaaaggaaggaagggtgcgtttggatataggtaagtttattgaaggaagggcaagaagttgaggcagtccgtgcctccataccttaactttttcattcatgtcaaataagtatttctaaaacattatagagactgtgttgacattgtaattaatttawcattttattaatcagtccaatggacttttctctcatttcccttgactgctctgtagtattaggtagtgttaactacttattttgaatagttgcatttgctaagtattaaatcttgttttatatcttgtccctgggctacataattccattttatggatttgatttagctgtcacctagctgtaacctctccatagaatgttaaagctgtatttctgcttgcttaatgaatatatccactttgatgttttgcaagaacctcaagttcaatgttcaatgatatcaaaatctattgaattatttccacataccacatcctagccaaacctgctcgctcttctatattttctatctttgtcattatgtggcctcgttccgttgtctattcagtgatcttactgctctaatacaataacttattaactgacctaagttcctctagaatttttttcccagtggatgctccataacctgagcagaatgtctctgcacatagaactatttgacacttctactcagaaatgtttgatggcttcccattgtcctcagaacataatctggatttttagcatggtatcgaggtttattcayggaacatagcttgaacctttcttgcctccacaaagcccagttacataggtttccccaaatgatctatttatttaagctgttctctgtctggaatgtttttactcttttgctttaccatcaaatcctactaacaagtcactggccagcaaatatgacatctttcaagcttgcctcagcttttcccagtcatatttagtcctttcctcctctgcgctcctgtagtttttttttttttaaccattcttatagcattcatcacaatcagattcatagacagttaaaaaggagtctatctctcccatgaggctataattkgggagcatatataacattgttgtatcacacttatatcttcatagaacactcatatcacactgataagcagtaaatcaacattgcctgaatgaatgaatgaatgaacaaatatatgatcaagtaaaatctaaaatccttkggccttgctaccacctcagtcttaaaaaatttcaagacagaaagcagcagcttctcaaacgacctgttttcttctttactgtctaatttggcacactgatttttcagtcagcaagactggggatcatattttgagtcttccttctcccttgttttcaggtcaagtcagctgctaaattctattctgtttccaaagtgtcccatatgtccactcctattttatttttattgctagtttaggctctcagtaccactgactggaaaagatctcctaatagtcttgtaacagattttccttctcttgtaatctattcttygacttattgttaaaagtcttcctaaagtacagaaactttcagaggtctctcattgcttacagaaatatcaacttattattcagcactttctactctgtaatccaaacctrccttttcaggcttatctctaactgcattataagtacgctgtatgccaataaaagtgatctgccttctccagttgctttaacatgtcttgaatttcctactttgtcctttttcatgctgttcctttgcttagtgaaattgttgagagtattgaacctctttagaatcttctggccaacttcaaatgccacctctttcataaaagcctttctcgagcctctaaattaaaactttatatgaacttttcatatacagcattgttaggtggtctctctccccaatattattgtggatatatttggaaatgttagacatttgaaatagaatcactacttagctacataggtatagtttctggtaaaatcacataatataaacaacacccaagggctctgtttctccaaaccccagggatttgtttctctttctcacacccatttatcatgttctgtttgtgtgtttttttgtgtgtgtgtgtttgtagagacagcgtctcactgttgctgtgcttgtgttaaagtatactagtgaaagttcaccaacaacagcaagggtcatatttatctctgtatttctaggggttcctagatgagtagtatcttacatattgtaggcactaaaaaaggcattggttaaactgagaaatgggataaccaaaataatatgctgctgaagggagatgatcatktatagaatcagaactaagaaaaaaactttttttttttttttttaaaaaccaaccaggccattagtaattatagaaagaacaatttcagggcatcacttgatagtggcagaagctagattccaagagattaagcagtaagtgggcattgagaaatggaggcaatgatgatagacacataagaatggaatacggtctgcagatttgggaagagacttgtgaacaaaaaccatatgtagtatttgaaagaaaaaggagtttgctgtcagaaatgcaagtaccaagattactccaaagtgtttccattttttcaagttggcagaaaagtactccaagtgagtcaggcaggccactgaagcgaataaccagctctagtgtgccgaggtcacaaagttagagtaagtttgtgaatcacagactaagaagacttgtaaacgtaaccttgttgaacgctggcaarggtgatgtcctggagtcaatagagtttacgttagtctggtccagtttagtctgattaaatcatttagagagaagagttactgaaccaaccgtgtatgtattgttaggaggtctctctctcttaaattattgtggatatattttgaaatgtaggacatttgaaatagaatcactacttagctaaataggtgtagtttctgataaaatcacatgatataaatgaaaatatttaaaggaattgtggctaatatttgttgakagatgtcatttctatttgtaagtaagggtgttgaatttgcacagtgatagtccagagctcctgaaatatatgtagttgttggatttaatttccctttgactccattgtacataaatattctcttaaagactttattgtaagaaacacaatatcggattaattctatttagtctttgtgtctttatatttaagactgtgattacataattaaaatactaaaaaatttcaaatatgaagctattttagcacacatgcatgtgtgcatcgtgtgtgtataaaaaatttattttaattttttagtatttatctgtatattgtgtggatgttacaaaaggcagaatactcatttcagaagccctggaccactttagaactaaaagagatcatcggggccaagattcttaacctttaagtccctaacattgtaagcacttcaggaaatagctctcatgggattttcaaagaggtctatgaccaccaaaaaagttaatcaccarcagtctaattggtacttttcacagagtgacagtgtaatggggagtgggaattaagtgacttggccaaggatactgctgttagctagataggactaatcctggtttctcaattcccaactacttctttaaccatcccagtgaaaataacatagtcaaaaaccagttcccactagttttttttttttttttttaaagattgtcattcttttaagacaacctcttaaaagaaatgtttgtctcagtattccaggaagtcttttgatgggaatgggacatgatatatggtatacagaataatatgcacacaataacaactccagaaggaaaactagacttccaccttccctacccatgttttatccctctccctcctttcacagatttcttttttgttttatcttgcatgttctagtgatggcctctgatgcatttaattagaataattcaatcttctgatcattctcattcagtctttcactccttaacaaatatttcctgagtgtctactttataccaagtgctatgctaggtcctaggagtagaatgttgagcaaaaccaacaggatcccttctccttgaagtttgatgtcttaggaagcgtagtcattaatcaagacaggcatggtgtcttgcatctgtaattctagcttcttgggagcctgagcggggaggatcacttgagtccaagaatttgaggctgcacagagctatgattgcactgttgcactccagcctgggtgacagaggaagaccctgcctcaaaaaaaaaaaccaaaaaaacaaaaaaaaatcattaatcaaacatttgcaaagatacgtaagaagagactggttgtaagtgaaaagaatgaaaagcacaaagtgctatgagagtggctatgggagcactggttttgtctggggcatctgattggattttcccaaggaggtgatatttcagttgagaggagtttggcagaaccatgctccctgcagaggggctagctaatttcagaatctcaaagaaggctrgtgtggttgaactggggagagcaaggggagagggagatacaaagaggaactggagaaggaggcaaggattagattatgtagcaacttgaggctgtggtaaggtattgatctttatcttgagagcagtagggagccactgaaggattttaagaaggggaatgacatgggttgtttccactttttggctattgtgaataatgctgctatgaacattcatgtacatattcatgtacattcatgtgtttttaatatatattttgtttttctctggtaaataatcgtgggtttttttgtgtgtggaaaaatattttcatttctcttgggtttatttttaggagtagaattgctgggtcatagggtaattgtgtgtttcaccttttaaggaactaccagactgtcttccaaagtggctataccattttacattcccacaagcagtgcctgagtgttctgattattccacatctttgccaacacctgctattgtctgtttttaaaaaaattttattatagacagtatagtgtgagtgaagtgatatctcattgtatgccccttgccttttattagccaggcttttaagcctggcatttagatttcagcaaattacagccttttatctgtttagtttgaataaactacytatttacaaaatatgccttgtagtttctcaagccctttatttttactttttttccctttgtgtgtgtgtgatttccaaagccttgatctgattcattcactcattaaaggcccaacctcagtgtcttctgtttccttcattagcacatggagccatctgaaatagttgatatttggccatctgacctataaaaacagcaatttcaaatggttcaacttaatacatttcttggcttcctctagtcataactattaccatttccttcgggtttttttttttttctcctggcccttgtttgtacctctcatggtattattgatatgcttgtgtggtataatgtctcttatkggtcagaaatctgaagtgcagaggctgtttcataacccaatgttttgtatatagaaagggcgtggtaataaaatttttttgcaggaagaaaagaacatgaaaattgtttcttcatgaaattatcttgtataattggagtgtctgtcagtgggagtaaacagttttgggaaatgtaatgtagaaaacagtwacaggcaaaaggagcattcgatttttactcatattttctcagagaaaagttattattggtgatgtaatcatgtaccctcttcccttggtactgtcttcttctttttagtcctttttaggacttaagagttttctttatgtagaagaaaagtaattttaagcagtcaatttcaaattggagttctttttcttcaawatttcaagaaactcttttgaaaactttaatcttctatgatagtttcacttttaaactgcatttgcwatgccaagacacatgcttccatagtgggaataatatttatttttctaatacttcaaacataatgccatccacgagacgtaagttcttattttgtaaacattaggccactaattatagttcttgccttcgaacttttgccgttataattttatttatgtaactaacctgacttgagggataatatgtgtacagtaacactcagttgtcataaataataatagctacatatgccacgtattcttctttcagtgttttacgtgttttattttgagaaggttgtttgctcacagaagattgtagtaaagaaagaatcttgaaatagtaaataataactatgtggggagaggagcttttaggtgagtaaatgcaatataatgttacaggtattatgatagaaatatgtacagtgtacagtaaaagaagcagtaggtatgtctacaagatagatgggacaaagagggcatggaagattataaaggacattagaggcagatacaatagggttatcaaaggcacagaggcatgaaatggctacagaacttaagaaatctgcaagccattcccagtggttccagatgagtaaaaactacagctggatatgtagaacaagggccagatcgtggaaaactgagtgttatgctgaggggttttggcttgattctgtaggcagtgaggaatcaatgaagatttaagcaagggattgatatgatcagatttaggttttggaaagatcactttggttttggtttgggatgatatattggatgagtaggagaaaagagacaagttatttgcactagtccagagaagtggtgttaggatggtaaaaagtaggatagagagaagatatacccaagggatggtagggaagtagactgtacaggactttggatagattggatgtgatagctgtgtgggagaagaggatggttatggtttaaaaaagtcacttggggaatgggagaatcattgagcactgtgttgggcctagctgatgtttctaatcgtaagtcctaagtggccccagtttgaagatttccttcactagtagccaagaaagatggttatgttggtccacatttagggattagcaggacagtcgtggctaatggatacggatataaggacactgatggttaggaagggaagcgaagtgggcaaaggagagcaatgaatcatgaaggataataaaaaatggaggggttgagggtctgggtgtctctactaggttgaagatgagatgaagggaaagttaagaaagttaaatatttagaaagggttggcatctagtcaaagattaatttcctcaagtttaagattatagtggcagggtaattcccagaagtgataaagtccamggtgtaatgacaagatgcacattgctgaagtgggaatgtgtatgaggttatgtaggaattgaggaattttgagctaggttgttgacagtttatctttatggataataaaattcccataatgatggcagctttggagtagaaagaaatgctagagaggaaagtgagccagatgagaaaacccttagtgagtgaggaggatgggtgggtggatgatagtaacaaggaggttgtatactgaaaagccataaaccttagaggaagaaggtttttatatgtgaagatgcaaaactaatagtaatgtagaagcctgagagttcagctgggaaaatgcttgtttcatctttgggcgttgttacatgtgggaaaagaaaagagtctcttattaaagtctgcagggaagtggattcctgtgaggagaggttagttgaggcagaggtgaaggggagaatcctgttgaagatgtaggggagtttattcactgtggactaaaacattcagataaagattaggaagagaattagtagttgaagaaaggcttggacagagaaaagtgggtgtaggaaacacaaagtaatatggtaatgaacatatgcgacagagtgttgactagaagttttagcatttggaacaaaggcccaggttgacaaggaaaacaggaatgtttggatggactgagatgaagtayataggcytaggaaatctggggaccaaaatggtatcggttacttaatgaggttagagactgcagtttctacttcaagttcaaatgccttgctaattacaagattcttattatttggagtttgtaattttaaaaagaggtggccatgtaactgaagttctctagtctaatgtgggaagtgttaagtgcagttatagacaaagtctatgaaagtgtagaagactgagagtttagttccaactggaagaccttcttggaacactccaagacttcttggagaagttagttttttaaaccaggtcttaaagggtaggtaggatgttattaaatagattagggtaaaggaacattctattttggaaaggcctgaagcagaggcatgaattttgggaaatacagagcttgtttgtggaacagttcataaaaaataaacatagagagcttgacttcaagatgagcaagggagaaatggaaaaaaagcagtggaaattagcgtgtgttataccagtagccatggtgactacaagcatgcacagagccagtatgacagaagaacacaaacaactacagaaaagagaactatgcatcctactgtgcccacggccaccttcagtctgagtagctgctaaaggcagcactttacgtttataccagaagttttaacagttctgctgcacctgcatgcttacttgctctctcatgctctctctgtctccctctctccctctatcctgtgcactctctctccctccctctctccccctttctctctctctgtgtgtgtgtgtgtttctgccgtaatcacaagaacagtactatgatgtattcccacactgtacccctccagttcaatatttgcctggagagtaaaaccctttgtagactggttatacagaaatayacattagtgcttattaaactataacactgtggatcataatatctacctatgtttatgtgtgtctgaagagaagttaataattaaaggctgtttaccacacttttgctagaaagactgattctttgaatctgagactgcaaagtataagttgcagtacctggatttgttattttctctctcttagatttatttacttyatacttgggctctaaagagccatttggtttctttctttctttcttttttttttttggtgagagtcttgctctgttgcccaggctggagtgcagtggtatgatctcagctcactgcaacctctacctgccaggttcaaatgattctcatgcttcagcctcccgagtagctgggactacaggcatgtgccaccactcctggctaatttttgtatttttagtagagagggagtttcaccatgttgcccaggctggttttgaactcctgggctgaagtgatccaccctccttggccttccaaagtgctgggattacaggcgtgagccactacacccaaccagagagctgtttggtttcttggtgctacatgctacaatagtctgtcaatattatttttctagataatacactctccataatttcaagttatattcaattgcctttaagagtttttctcccagaagggcataggcgtataaaatagcattatacatttgaacttgccccagatagactttatgagatgttgattgctatattgtgtttgactgtctagaacagactctattacagtgatttaaaaaatttaagttcatttattttatttaaaaaattttaattttatttaatttttcgagatgagttcttggcatgttgcccaggctggtctcaaactcctgggctcaagtgatccttctgcttcagcctcttgagcatcttggactacaggcacacacagctgtgctcacccatttatgttacataacaagaattccagaggtagagagttgttggctcagtgatgctacaagaacctatgctcatcctattctttggctccttgtcctcagcaggccagcacattgctaatgtttataagatggctcttgtattttcaaactttatattcttattttaggcaagagaaatgggaaaggacaaagactaccctgctgtttctgctcccctttattgagaaaataaaaggtttctatagccattagcagatttcccactaaatcccactgactggaattgactcacgtggctctcctagccacaaggaagagaatagcaagcctcttgtcttcggcagggcacaaactaccctgatcaaagttagggagaaaggggaatctatttgaaggagggagctaacaatgtctgtcaaagtactgtgcttaaaatttggttattttgcctgttattttaaggcaaatgacatttaatcagaatttagatacaaaaaaaaggaaaacatcacagcctatcactttttctttccttacattataaaactatgtaatataatttcttatgactgcttttttgtataatagtataggttgttggaaatastatgttgtgtttgcactggaatgccacttttcattcatttaaatgaagtgacaatttcttttttggggaggtgattttcacattgtataagtaatttagttattcttgttataggcaggtttgtaatgaataaatgggattcattttaaagctaaatggttcttaatattatcacaactcaaaggtgaagtatttcatcmaaayctagtgaaaaaaattttgcattctggtataaggaagacttttaatatgttttagaaaaatacatttttgaaaatctgaactttaacacccaattcaaagtatttgaggtttttctaccattgatcttaccttaaataattttaactttgttttactgataagaggaaatgatatcagttattcaatttgtggcatattgtcacagatttttaaatttaacaaacataatacatgttaacagtgtacacaggtcctgaagtagattttgtggaaaataaaaaagaagtgggcttgagcacggtagcccatgcatgaaatcccgacactttgggaggctgagtgagaggatcgtttgaggccaggagtttgaggagaacagcctggataacatagtgagacctcatttctcccccgcccccctccccccccmaaaaagacataatttttgttcttggggcactagttggtgagacaaaataaacaataaaagcgtgatcaggtatcgaaagtttggccaggcgcagtggctcacacctgtaatcccagcactttgggaggccgaagcgggcacatcagttgaggtcaggagttcaagaccagcctggccaacatggtgaaacctcgtctctacaaaaatacaaaaattagccaggtatgggggcaggtgcctgtaatcccagctactcaggmgtctgagacaggagaatcgcttgaacctgggaggcggaggttgcagtgaccggagatcgcaccattgcactccagcctgggtgacaagagtgaaactctgtctcagaaaaaaaaaaaaaaagttctataggaatttaagaaagtaaaagtaactgtagagtgattacttataatggaagaagtagatacttcaggcagggttgtttgatgtggtgggarggtacaaggtacaaagaacttctctttccatcctcatctgctcttttatccattcacccttattcaactatttgtagtatctgagatgttctgtagactttgatacttctatacctttgcattgccttttgtttgttcttgaaatttccttgtttgttggtctgataatctcctatcttttgagactcagtttgaatatcatctcctctgagaagtcttccctgaactttctggccagaattggctgcttccttttcttttctcccatagatayttgtatgtatgtggggtgtttgtgtgtgtgtgtgtgtgtgtwtgtgtgtgtgtatgtgtttctatttagagtcataacactgcaccactttatttacttgtctgtgtcacaggcttgtgagcttcatgaacatggggatgatgtcatatttattttcaaatcacagtgcctggtgtagtggttttgtacattggaccactcartgaatgttctttggatgaatgaatggatgggtgaatggataaaaagaaggaattagcctggagtgtcttcatgagtattgggagtctatccagagggaacttggatcataagaatacttgacccagcaggaatagtttgtaatttgttaagacttagagataagattgaataggcaaagcagaacttagttggctgtggaaattttaataaatattggagttatattaaatacaatgtctgaaattggtctttgaagcccccatttttccaacatactgtacttttgtattttgtagtgcctccacttctcattcagagaattcagtgcatacaaaatcagcttctgttgtatcatcagattccatttcaacttctgccgacaacttttctcctgatttgagggtatgtatactattttaawgttctgatgaagtactttctgttaaatatttgtggccaacactatcaatataactaatttagcaggagatactgatggagtattctcatagatcccggtctacaaaatatcccagaataggccagcaaatttggartgcttacttatttgtaaaagaaaaatgtgtaattcatctctgaggttgatcacctctaagttctttgccaaaagatgattaatgaattttttgtggtataaaagatttttatgattattctcataataaccagtaatagctaacatttattgaatatgtactgtgtgccaagcgttgttctaagtgctatacatgaattatctcttgtaaaactctgaccaattctgtcaccattctacagatgataataacttgtagagattaagtaatatgtccaagatctcatagctaataaattctattgccggtgttccagcccatgcagtccagttcgggagctaagtcacttaaacactgtgtgatagttcctacacatctcattatagtttgtaagtattcctctatttattaaaggtctcrtttctatgaaattaaccacattagtgatatcctgtagcactctgtacatttctggatttatctacttttctataactgcttgtctatgaatgattgagaaaatgaattatatgtgtagtgctaaccctttaactttacttcataatcgttttttttttctccaaaaaacacgaaacaataaacattwatttctcatggttctggaagctgggaagtccaagatcaaggtgctggcaaatccattatctgatgagggtatgtcttcttgtatcctcacctgatggacagtatgtcagaatctttttattccaaacatgtggctgctttctcactggttacacttacacaattttagctaaaacattgttttccttaaggaagtcatttgctgttgagcataagttgaggatacttatatctttttcatccatttcattgtcaaaacagaattcaacaagaagacaacatctgtaaaatcttctgcatatttgtcattaccttttgtgaaatttcataaaatattagattgggagtagcatgattttaaacatcactaaaaattagaaaggcttatcttcgtaatctgcatatatcttatgctaattatgaaaacttcatgctatcattagccattatcttgaagcatacaaagggcagggttcattgttaacaagaatggttataaatccattgttgcttctcaagttgttactattttaaaatatatgtatgtatctaatgtttgcttattcattacattaataaaaatccactaagggctcataggcttcttaataattttgaaatgtcttggcatacttctggtcagatttatttagttaaaagtatcattaaataacaactaacctcatattgtgactgataactcaggaatgaagggatgtcacttatgctacttgcttatgcctatatcctacctgctgtttcctgtctgagacattttaaatcatttgtgtatacttgtgagtattagtttaaactacttaactcgacatacatgtgaagtgcagtacactgcaggatgctgaaaatggatagatgaaggaggattctccactgtcaacttctctctgcatgcagacctccatcatttcctcaggacaccatgaatatcataaatagtgaatgactggcttacatttggacaaaatgagggccatagtgcataatgttaatctgtatataaaatattttaaggtttgctactttttcttaaacttttaattttagaacagttttagattcttagaaaaattgcaaagataatagagttcccatctactttacatccagttccacccattataacatcttacattagtaagctacatttgttccacataatgaaccaatactgatacgttattattaaagtccacactttattgagatatccttagtttttacctaatgttctttttgttccaggatsctacccatgcaggatgccacattacatttagtagttatgtctccttaggtttctcttggctgggacagtttctcagacttttttgtttttgatgactgtgtcagactgtatcttgtttttgatgacttgatggtattttatagaccatgtgacattttactcattcaactggggttatgtgttttggggaggaaggtcacagaggtaaagtgagtgccatttcatcacattttattaagagtacttactatcaacatgacttatcactgctgatgataaccttgatcacttggttgaggcggtgttaggttttttcactgtaattattccctgagcccctcccccacccacatactgtactttttggaaagaagttgctatgcacagcccacacttaaggagtagggggttatactctacctccttgagggtggaacatctaacaagatgttttgaattctgcatgggagatttgtttctcccatttattgatttgtttaatcttttatttatcttattatggactcatggatatttattttatactttttgttacaatccagaacgactttattgattccagcttcaaattgagagttctttcagtcagatcttttgttcctttgctatgctctcgtcattgtgttttttgwgcacttgcttactttctggcacgacaagatgctccagactcataatatatatttcctccctcagttctagaatcatcatccagttttcataggagccctggttcctttttttggaaaacaatagctagccactaggtgtgtttagttgttattttttttacaaaagaaaaagtaacaaagccttttccttctgaagcaaaagatcattttgcamatgtacaatctggagataatacgatgggtagggtgattataaatgcaaatttgtctagaatagttgtcccttcaggtttaacgttagacgtaagtgtcctgaattacatgactaccttagcactaggttacaaagggagtctgtcaaatttatacatcagctctgtttgcaggaattgtttcaatgtatccccattagtgccttactaatttaggatctttaacaacttaggaagaccctcacagaatttttatttgctgaataagcagatagctgttagatcaaggagaagatggttttaggcaacaaaggttaactgttctttccctaggagagtgcctaaaagggcagagaaaaaaaagaaaagtagtatgttgttaagctacatgttacccagttttctcatttttaaaggtatctttagttgttagatatatctttacttgaattacagtcttcagttgctggagggagatgagtgagtaacactaaattaagtgttagtatcatttaaaaaatctggcctgatttcaaaggtatatgtggatttcttttgtggggaaggttgtggtgggagaagggatgtgcttctaacaattaaaaaaagtctagcctgctattatgatagatattcgtrcatgactcatctcttttagctttctcaacaatcctgtgatccagttgttattattcccatttgacaaatgagaaacctgacagtcagaaagggtgaatgaaatcatgtgcttagtggcacagttggctgttacccttattttgtctcaggtcattcatactcttgtaggatacattactaggagagactcctcccacagttttgctgctaaacttttttaaatgctaagtgagattttcttagttaataaggaatatattttatacattttgggggatgaaaatagtgggtttcaatatttcttaataaatctttgagaaatgctttgctaagtaaccagaaaaggagagttttataataaaatttgatttcctctctcaattttttaaattgatgatgattgcttttcatgtgtatacctttagcagccataaaatggtagtgttttaattacaggcaaaactaactgcagacagcgacgtgttgcattttgactgactgtggtttggctcttatgtgtgtgatgaagggtttggtgtagtgtttttgaaaattatcattcacagatgatttgaagctggttaacctctaggcttccagttcttcacatagcctcattgcttatttgtgtcctgagccttcacattttataagctcctttagtaatagcttttaaatagaaagtgtagagaacataatacattgaaaagctaatccagtttcattaaaaaggttaaattgtgtaggttttttgctataggtactgtaaaatggcactttcctgaaaggatagtgccttagtagattaacagctaactatgaaagctttttctgttaagaattttgtattcaaacaagatttgttgcctctgcatcagtaaagcagaatggaaaatgggctggggatggaactagtctagatatatcttgaactttgatttttcaagtggaattatattkgtattacttttttgccttgttatccttgtttgttatggaaaaagtcttatacagatgtaatctggtagatgtgttttggaaaaattgggcacgaatccaggctttgtaaatggaattgtgcttttctggtgacataattgtagagtgttttctccttgcttcatttgttctccctctggaagtaaaacttatttaatctcagttttaaaacttaaaaatgtagtattcttttacatagaatttcaagtaatgcaatttaaagaaataactcatttgcaatttttaaaattaggcttgtttttactaaaacatatttctgaagttggcaacttagtagaattaagaacccagggaacttatgtctgattatttatttgctcactggagaataaatcccacaaaatataggattttaaaattcaaatgcacagctctacttatttataagttataatttgtatagcactgggttttaattaaagtatgtgcctcaaatgatggttattgaaagataaaagtcaagctatgtagtagttcctttcctttgtgaagcctgttgttttataccaatgtttgtcaacaattcagaattaaatattaaatagacttatgtcttttggccgggcgcggtggatcacgcctgtaatcccagcactttgggaggccgagatgggcggatcacgaggtcaggagatcgagaccatcctggctaacacggtgaaaccccgtctctctaaaaatmcaaaaaaaaaaaaaaaaaaattagctggatgtggtggcgggcgcctgtagtcccagctactcgggaggctgaggcaggaaaatggcgtgaacccgggaggcggagctggcagtgagccaagatcgtgccactgcactccagcctgggcgacagagtgagactctgtctcaaaaaaaaaaaaaaacaacacaaaataattatgtcttttatgtctttgttttagatatcttatgtacatgtatatgataaaggatatgttttgttcttaaccatctgtcttgtcttgaagtatgtaataggcttaaatcaggcaaacgtgtctgtcttcaaaatctgtgttatgcatatttcctttgcaaactaaaggccagaaattattttattttattttattttattttattttattttagagggagtctcgctctatcccctaggctggagtgcattggcgccatctcggctcatttgcaacctctgtctcccgggttcaagcgattctcctgcctcagcttcccgaggagctgggattacaggtgcgtgccaccacgcctggctaattttttgtatttttagtagagacggggtttcaccgtgttagccaggatgaccttgatcttctgatctcatgatccgcccacctcggcccccccgagagtgttgggattacaggcgtgagccaccgcgcctggccaattggattattagactatgtccrtgaatgtgatattgacatgtactgaaaatatgcagatctatttagaatgagttaaggagtctcatagagcttatgttagatagtaaacagtgtctatcacataatgattattttaatagagaagaaatgattattagcatttatttatgattagcaccacgacctcccttaccaacaatatcaactcttaagaacctaggaattgaaaaaaatcaaccttagcccgataaagggtatccatcagaactctacaataagcctcatacttaatgatgaaatactagaaatacgttcattaagcttagaaacatgatgattactatcgctacttttattcagcattatgctggaaaccctagccagtaaaataagaaaaataataaatgatacaagaaatgaaaggaataaacaaaactttcattatttatagaggattgtctgtatgggaaatctgagaaaatctatatacaaactaccagaactaattgtatagcttaccactgttgcyggatacaagataacataaaaagatcatgcttttgtaccttagcaaaaatgtttagaaaatgtgatttaaagaagatcccagttacaacagcaacaaaagtaccttacttaggaataagttaaaacgagatatagaagaactttatgaagaaagttataaaactttattaaagaagctaaaaggatatctaaataaatggatgggtaaatcaatagtctggaggtgtaaaatattttcaaatatatctgttaattgaatataattccaaaaaaattcaaaagtttgttttgcagaacttggcmaaattttagctgactctaaaatttatatgcaagggtaaaaggtcaagattaacccagaggaaaaataaagtggggagattcacccaatcaggcataagctaaagtaaatcagaataggaataaatcagtcaagtttagaaacagactgatgtttgtaggaactctgtatatgacagatgtataacaaatcagtgggagaaagaatgaactatttggtaatcaatgctaggttggccatgtttaaaaaaaaaaaggttgaatttctaactcacacacaccaactggattcattagattgaaaacctaaaactgaaaataagaactttaaaattttagaagaaaatatatgacaatatcattatgacttacgatatcaggaagaatatttaaaataagactctaaggtattaacttttaaagaaaagattattattttgattgtgctaaaatttaccaactttatgtgacaaattccgtatgtgaagactgtgaaaagacaggtcacattttgggatagtagacttgcaaagaatatgtgtaactgataaaagattagtacccaaatatgcaaagaacatctacaaattaataagagaaaatgcaacccaacagaaagttgagaaagtctatgaacaagaaattcaaggaaaaatatatacataatgtttaaccaatatattttaaaatgttaaacctcactataatcagggaatcagggatatgtcatttttaaagcaactgagaaaacttatttcacattcatcagatcaaaacaattaacaagtctgataataccaaggattgtttgaaaagtggggcagtgggaattctcatacagtgctgaaacagccacagtagagagaaatatagcaatatctacaaatgctcattcttcttagcagttccagttttactaatgtagaaagtcccacatttattccaggagactggaataaagatcttaattgtacattatttgtgtacgtgataaatgtacatcatttgatcattaataaattgtggtatattctatgacagaatggtatctatctagctaagtaaatttcaataaacaaaacatactatatattgattatagacatatatgcagttgagaaaatacaagctcctcctaaaacacacragtaatgtattgagtatcttacagtttctctcttgcttcaccacatcaccaaaggcctgtttacctcagttctttttacctagtaccttttacatgtctgacttccaagaaaaaattacaaggcacactaaaaggcaaaatttatatataagaattatagctttctattataaaaatacttataaaatataagagaaaaattctataataactaaaaatgtaaaatatctaggaataaacttaaatatgcagaaaatatgtgaagaaactttaaaactctgctgagtggtaaagatgaatacttaaacagaaaaacataccttgatttgaacagaaaagctcagtatttttaagattttaatttttgcttattctataaataatatggttaaaatttgacaagataatcctgaagtttgtaatgacaagtctggagacaatataaatgcctttcagtggggaggatgattttaagtttatttatatgtttactattgaatatgtgcagtctgaaatgaatggtgcatctccatttgtttttcaagatagattaaaaatccaaggacagaagaacattgtgaataataagctcccatttgttggcgatagtaggtggagtgatagaagaggctgtgggtacataaacaggtgatactagtcaagagcaggtcaaatggaaagaatgaagacatgtttggaggctactggaataattccaagtaaaagttgctaaaggacatgtactaggataatgacataatgctttgtaaaaaacaaatctgaaaaaattataggtgaatgtaatgtacacaaagctatctgaacattgcagattatgggaagagaggagtcaaagatgatgattccaggtttcaaatctggtgacaatatgtggttcatttctcatctgccctcccctcctatgtgtactttgctgttccttctcttataagtggggtaatgctaaagttttcttcatcccttgctttccccactctctttcttccacattctctttcttcttcgtggtttcagctgtcatctctttttggatgactcccacatttttacctctggttctgatctctttctcagcctctggtccttcatatcccttgcttgcttgggatgttatcatgttaygatcatggtcttagtgtaatcagacatctgttcaattccagccactgttgggagatatatgtcaccttggaaaagttccttaacttctataagggtcaatgaccccatttataaatgggcatatgaatactacttatctttcaagggtgttaagagcactgaatgaataatgatcttctaaaaacagtacataaactgggctcattctccttggtatgaggtgaaatgaaagaaatttagataatattatatctattcacctatcttctgtctttcttgtttttggcatataatctattatgaaccatcatttattggaaaggactgtctgaagtatagctcagaaggacacatcagaaggtgtggggctcgtccttatggatggagaagtggggctatattggtgtggggaatgaaaggatgagmcaggacaaaatgtagaaatagattaaatatgagagtcaaggaagcattaaattatgacttagctgatrtatagaataatatgttaccctttagagatacaggattttttgtagaagtttttgcagaaaagtgaaggaattgatatttattacgttgactgtaccttgtgtggtgcatttgttgcaactgatgaaacgatactgatacatttttatattaatactaaaatacatagtttgcattagggttcatactttgtggtgtacrttctgcgggttttgacgaaggtatggtggcatatattcattgttactgtatcatgtagaatagttttagtgccctaaaaatcccctttgcgtcacctctttcattttcccctctccctgaacaccaggcaatcactaatctttttctgtgtccacatttttgccttttccagaatgtcatgtagttagaatcatctagtgtgcggtcttttcagagtggcttctttcacttagtaatatccttttaagattcctcaagtctttccatggcttgatagctaatttctttttattactgaatgatattcctttgtatgacgtaccacaattcatttatccattctcctgctgaaggtcagattgcttctaagttttcatagttatgaaaacttgtattttaagattaaaatctggaagtttttattgatattaggcattcgtttcttagggctgctataataacagagtaccacaaactgggtagcttaaaacaacagaaatttattctttcatagttctggagcctagacatcagaaatcaaggtrttagcagggttggcacctgccaaccaagagagctttgagggagaatctattccatacctttctcctagctgctcatgagggttagccatctttgatgttccttggattgtaaatgcatcagtccaatctctgcttccctcttcatggggcattctccctgtttcttcacattgctgtcttcttgtgaggataccagtcatattgaattaggggcccaccctacaccagtatgacctcatcttaactaattatatctgcaacaaccctatttccaaattaggtcacattytaaggcactggtggttagacttcaacaacgttattagagggcacagttcaacccatagcatgaagtgatgctttctagaccattcttctttagatagtcatcctttttgttattgttgaatcatggatggtgatgtaacgttttccagctttggctagttgtggtttcagctgaaaaaccaaaatgtccctgactgtgttatataaaaaaaaaaaaaaaaaaaaaaaaaaaaaaaarggcttccctgtgcttgatcttgaatgtactttgaaatgtgtaaccactaaratctatcccagatgccagtctgtggctctaccttgttagaatttttgtttgcatggttcatttggccacttcgtggcttgtcagtcaagttgtagagaaaatagaataaagtataattgatataaacagttttctttagaaggattatccaacaaaaaataagttactaagaaaatcctttttttctcttctgggttttagtacagtatgtaaaaagactgtggaggatagtttataactgtatagactcatttttccctttcaggtgattattatttagtgttttgcagatttcagacaaattctttcctatttttctaccatctaaccattccatgtgaaaactgacttaaacttgccaacttctagatcgagtttatagtaatttcctaattgtgtgtgtgtgagagagtgcatttttgtgtttgtgtgcctgtgtgtgtgagaaagagagagggagagaagagaaagggagggagtgaaaaaagaagttaaagtcacatggaaaattactgggcagtttgaaaataatttgatgaagtgggcatggaagaaaatcagggctgggaagggaggaatactaaactgattatgtagtaggaataaaaaaaattataaatttgaatcttgtgtgttttgaagtaagagttttaataagattatcagacttttcttgataataaaaggattaaatattgtattaaatgctatcaaatagcacattttatggaatcttacctattgatgtggccagagctccagagtcaggcagggttctgatgcatctcatagaaaacaggttggctagccagttagtaacattattttgacccaataagagaaagtgcttgatgtattctagaggatttctccaggagtgaattttcttccctcatatctgagggttatgtaacttattctccactaaagatatttacatgtgaaggcagaaaaacctaatggaccagagtggctttggtctcttggttcccaaccaccattttaagaagataggttcggaagctcaaactgggtggagcccaccgcagctcaaggaggcctgcctgcctctgaagactccacctctgggggcagggcatagccaaacaaaaggcagcagaaacctctgcagacttaaatgtccctgtctgacagctttgaagagagtagtggttctcccagcacgcagctggagatctgagaatggacaaactgcctcctcaagtgggtctctgaccccagagtagcctaactgggaggcatcccccagtaggggcagactgacacctcacatggccgggtacttctctgagayaaaacttccagaggaacgatcaggcagcaacatttgctgttcaccaatatctactgttctgcagactccgctgctgatacccaggcaaagagggtctagagtggacctccagcaaactccaacagacctgcagctgagggtcctgactgttagaaggaaaactaacaaacagaaaggacatccacaccaaaaccccatctgtatgtcaccatcatcaaagaccaaaggtagataaaaccacaaagatggggaaaaaacagagcagaaaaactggaaactctaaaagtcagaagagcacctctcctcctccagaggaacgcagctcctcaccaacaacggaacgaagctggacagagaatgactttgacgagttgagagaagaaggcttcagacgatcaaactactctgagctaaaggaggaacttcaaacccatggcaaagaagttaaaaaccttgaaaaaaaaattagacgaatggctaactagaataaccaatgcagtgaagtcctgaaaggacctgatggagctgaaaaccgtggcatkagaactacgtgacgaatgcacaagcctcagtagctgattcgatcaactggaataaagggtatcagtgatggaagatcaaatgaatgaaatgaagcgagaagagaagtttagagaaaaaagaatgaaaagaaatgaacaaagcctccaagaaatatgggactatgtgaaaagaccaaatctatgtctgattggtgtacctgaaagtgacggggagaatggaaccaagttggaaaacattctgcaggatattatccaggagaacttccccaatctagcaaggcaggccaacattcaaattcaggaaatacagagaatgccacaaagatactcctcgagaagagcaactccaagacacgtaattgtcagattcaccaaagttgaaatgaaggaaaaaatgttaagggcagccagagagaaaggtcaggttayccacaaagggaagcccatcagactaacagctgatctctyggcagaaactctacaagccagaagagagtgggggccaatattcaacattcttaaagaaaagaattttcaacccagaatttcatatccagccaaactaagctccataagtgaaggagaaataaaatcctttacagacaagcaaatgctgagagatttttgtcaccgccaggcctgccctacaagcgctcctgaargaaacactaaacagggaaaggaacaactggtaccagccactgcaaaaacatgccaaattgtaaagaccattgaggctaggaagaaaaagcatcaactaacgagcaaaataaccagctaacatcataatgacaggatcaaattcacacataacaatattaagcttaaatgtaaacaggctraatgctccaattaaaagacacagactggcaaattggataaagagtcaagacccatcagtgtgctgtattcaggaaacccatctcacrtgcagagacacacataggctcaaaataaagggatggaggaagatctaccaagcaaatggaaaacaaaaaaaggcaggggttgcaatcctagtctctgataaaacagactttaaaccaacaaagatcaaaagacacaaagaggccattacataatggtaaagggatcaattcaacaagaagagctaactatcctaaatatatatgcacctaatacaggagcacccagattcataaagcaagtccttagagacctacaaagagactcagactcccacacaataataatgggagactttaacaccccactgtcaatattagacagatcagtgagacagaaagttaacaaggatatccaggaattgaactcagctctgcaccaagcagacctaatagacatctacagaactctccaccccaaatcaacagaatatacattcttttcagcaccacaccacacttgttccaaaactgaccacatagttggaagtaaagcactcctcagcaaatgtaaaacaagagaaattataacaaactgtctctcagaccacagtgcaatcaaactagaactcaggattaagaaactcactcaaaaccactcaactacatggaaactgaacaacctgctcctgaatgactattgggtacataacaaaatgaaggcagaaataaagatgttctttgaaaccaatgagaacaaagacacaacataccagaatctctgggacacattcaaagcagtgtgtagagggaaatttatagcactaaatgcccacaagagaaagyggaaagatctaaaattgacaccctaacatcacaattaaaagaactagagaagcaagagcaaacattcaaaagctagcagaaggcaagaagtaactaagatcagagcagaactgaaggagatagagacacaaaaaacccttcaaaaaatcagtgaatccaggagctggttttttgaaaagatcaaaattggtagaccgctagaacaaagaagaaaagagagaagaatcaaatagatgcaataaaaaatgataaagggaagatcaccaccgatcccacagaaatacaaactaccatcagagaatactataaacacctctatgcaaataaactagaaaatctagaagaaatggatamattcctygacacatacactctcccaaggctaaaccaggaagaagttgaatccctgaatagaccaataacaggctctgaaattgaggcaataattaatagcttaccaaccaaaaaaagtccaggaccagatggattcacagcccagaagtacaaggaggaactggtaccattccttctgaaactattccaatcaatagaaaaagagggactcctccctaactcatttgatgaggccagcatcatcctgataccaaaacctggcagagacacaacaaaaaaagagaattttagaccagtattcctgatgaacattgatgcaaaaatcctcaataaaatactggcaaaccraatccagcagcacatcaaaaagcttatccaccatgatcaagtgggatgtacatccctgggatgtaaggctggttcaacatacacaaatcaataaacgtaatccagcatataaacagaatcaatgacaaaaaccacatgattatctcartggatgcagaaaaggcctttgacaaaattcaacaacgcttcatgctaaaaactctcaatacattaggtattgatgggacgtatctcaaaataataagagctatctatgacaaacccacagccagtatcatactgaatgggcaaaaactggaagcattccctttgaaaactggcacaagacagggatgccctctctcaccactcctattcaacatagtgttggaagttctggccagggcaatcaggcaggagaaggaaataaagtgtattcaattaggaaaagaggaagtcaaattgtccctgtttgcagatgacatgattgtatatctagaaaaccccatcgtctcagcccaaaatctccttaagctgataagcaacttcagcaaagtctcaggatacaaaatcaatatgcaaaaatcacaagcattcttatacaccaataacagacaaacagccaaatcatgaactcccattcacagttgcttcaaagagaataaaatatctaggaatccaacttacaagggacstgaaggacctcttcaaggagaactacaaaccactgctcaatgaaataaaagaggatacaaacaaatggatgaacattccatgctcatgggtaggaagaatcaatatcgtgaaaatggccatactacccaaggtaatttatagattcaatgccatccccatcaagctgccaatgactttcttcacagaattggaaaaaactactttaaagttcatatggaaccaaaaaagagcccgccttgccaagtcaatcctaagccaaaagaacaaagctggaggcatcacacatatctacaactatctgatctttgacaaacctgacaaaaacaagaaatggggaaaggattccctatttaataaacagtgctgggaaaactggctagccatatgtagaaagctgaaactggatcccttccttacaccttatacaaaaattaattcaagatggattaaagacttaaatgttaggcctaaaaccataaaaaccctagaagaaaacctaggcaataccattcaggacataggcatggtcaaggacttcatgtctaaaacagcaaaagcaatggcaacaaaagccaaaattgacaaattgsatctaattaaactaaagagcttctgcacagcaaaagaaactaccatcagagtgaacaggcaacctgcagaatgggagaaaatttttgcaatctactcatctgacaaaggcctaatatccagaatctacaatgaactcaaacaaatttacaagaaaaaacaaccccatcaaaaagtgggtgaaagatataaacagatacttctcaaaaggagacatttatgcagccaaaagacacatgaaaaaatgctcatcatcactggccatcagagaaatgcaaatgaaaaccacaatgagataccatctcacaccagttagaatggcgatcattaaaaagtcaggaaacaacaggtgctggagaggatgtggagaaataggaacacttttacactgttggtggggactgtaaactagttcaaccattgtggaagtcagtgtggcgattcctcagggatctagaactagaaataccatttgacccagccatcccattactggktatatacccaagggattataaatcacgctgctataaacacacatgcacacgttatgtttattgtggcactattcacaatagcaaagacttggaaccaacccaaatgtccaacaatgatagattggattcagaaaatgtggcacatatacaccatggaatactatgcagccataaaaaatgatgagtttgtgtcctttgtaggggcatggatgaagctggaaaccatcattctcaggaaactatcacaaggacaaaacaccaaacaccgcatgttctcactcataggtgggaattggacaatgagaacacatggacacaggaaggggagcatcacacaccagggcctgttgtggggtgggggaaggggggagggatagcattaggagatatacctaatgttaaatgacgagttaatgggtgcaacacactaacatggcacatgtatacatatgtaacaaacctgcacattgtgcacatgtaccctgaaacttaaagtataataaaaaaaaaaaraaaaagaaaaaaagaaccttaaaaaaaaaaaagaagataggttcctggtgtttttgagttgcctctcttgttttgacctcacttcatttattcattgaatctgctttctctcttctcccattgctgacatatctgagatgcaattcctctcaagtaaaaatcatcaagtattattcatataattgcttctatttgttttataagcctagggtcagatttgatcacttttccaatgtatcatattcctctttatttctattaccatagactaatccaggattctatttctttcgtagattatcatcatttcatcttcttccttttcatttctttgccctccttgaccrtgccatctgcccctatcaaaggcctgcagtgttttgtttttttttacatgactggtcaagtttaaagtccttaacttctccccagtattttattataaaaatttctgaacacaamataaagtttacaaaggaccctgctgtatccaccatcagaatttttccattaacgttttaccctacttccttgtttttatctgacatccatcatctgtgtgtccctctatccatctatttatctggcttactttttgatgcatttcaaagtaaattgcagacattagtagttttccaactaaatatgtcagcatgcaaataaatatatgtaatttttcttttgatataaaatttatatctattgaaatacagaaatcttaagtgtacattctatgagtttagaaaaatgcatacacctgtacaacccaaatccctgtcaagatatagaacttgtcaccccagatactttcatcatgcyccttttcagtccacactctcattctcatccycatagcaacaactgttttgaagtttttgtactatagtttagtctgttgcagaatttcatataaatggacccatacgatatggactgtcttgctgaaggcatcttgaaacccttcactaggataccctaaacttttactccatttttatttctcaagccatctcctttattctctcaggtagacattattccattaattttcctaagttgtgtcagactctttggaatattgcagctgtcttcagtcctcataagaaatgaaagaaagggaaaagatttgctgctttccttacaacmgtgagatgcttactattctgtagctaaatctagaatatagtagttaggagtcagggagagattgatttatggttccctatatgacatgctttctcaaatattaatccctttgatgagtattagagaaagtgtgtcatatagggaatctctagagcagagaaaaaagcaccatgtcaataggccattttggtaaaaggcggtgaaaacttctgttgatgcttctattacgtgaataataagtacagatgctcctcgacctatgatggggttacatccagataaacccattgtaagttgaaaataccataagttgaaccactgtaagtcagggactgtctgtatttttttttttttcatttycatggtgttttgcaaatctctttatggtgcagttatcttgatttcatagttgctaacttttaaggtgggtattaatatcatgktaataacatgaatggtgaaactaagactcagagcgtagtatggtggtagtgaatgtggagtttttttaggggttcttaggatatgaaacataaggttttgcagtacaccacaaatcccttgtatattttaattttgattttccctttttagctgaatcacagtttaagatatttttttctttttctttttttttttctaaaaagtatttctgggttgtattttctgagacctggctatctgagaatgacttcctgctgccattaaatactttttgggagcattttccttcacagctttgatcacattttgttattgtcttgtagaatatggtattatagataaccttgaagctaacttgattttgctttcttcaaaggtaattttttttccacctatattcttacagtttatattttaattcttttagttcaaaaaaatttgccaagatgcaactaggtatgtctctgttcattgattttgggtggaacatggtaaactcttctgatcaacatcaattatatattggactttttgctcctcttgattattttttttttcctttagaaaatacaattcttttcttgattattttccatgatgattttatctttgttcttttccttcaaattcttacagcacttttcaagtttgtcctcaacattaaatctgttttctgaataaccaatgcaatttgttgctaattgcatacagattttatttctgctattacatttttaaatgtccttgcagtcattctcattcatttctcttgtttcatkgtgtctctctccttatgactttctgtttctactctatttcttttttttctttttctttttctttcttttttttttttttttttttttttttagcacagggtctcactcccattgcctaggctggagtgcagtggagtgcatcacagctcactgaagccttgacttctggggctcaaggtagtcctctcatcacagcctcccaagtagctgagactgtagacccgtgatgccatgcctgcccagctgattttttgcatttatagtagacacagggttttgccgtgttgtccaggctggtcttgaattcctggtttcaagcagtccactcgcctcggcctcctaggatgctgagagcataggctgagccactgcgcctggccttctctttgtgtttattagaaaatatggcttatttccttttgagtgtgccaagtaccttatacatgcttttacaaatgcctatagagaattattttcagaagactgctttcttttttaaagtttcgggttgatattctcttttctttgtaagtcttttttttttttttctaggccttttttttcctagtctcttttctcctgtttgattaaggatagatttgtctagaatcagtgttkgtcaacaaacacagggtctagattgccccatccctgttctgttcacttgagtgctagttggagttccttttcctatctccagtgtagaattagttgtttatatacaacctttagcataagcctattgttaaaagtctgtcatctagagcagctctgctggacaaagataggatcttgtattgcttcttttcattgcctcgctctttgacattctggtcagagagaatataagaaagcctatgtgtggttctcaaagtgtgctgcttgcatgagttttcctgtctcttttctcactttatgaagctttaggaggattgtgtctcccatgtttctgtgtgcctttgccagaactaccctcttctcttctgtacataacataaatattttccgggggttgctggtcctttctgaatrtagaaatgtagagaaaaaggaagtcatgtggagcagtgctgtagcagccacaagaaggtatacatatgcaatatgggaactactgcccagcgttataagtgacataaacgttgtatttctgagtgaggtggtagaccggggaaagaataaagcatcttcctttctataatctttcacgtggttgatttttttcggtatactctgatatttgttttgttatctttgggtctaattttgttgctttcataattagtagaattattagcagattctggcaattagttgttagtttgaacttttattaacagtagacaacacttattacatacatcttatgtgttaacactgatataagtactttaaatgtattaacccatttaattttcataacaacctatgtgtggtactataatagttaccattttatagatgcggaaaatgaggcatagagaagttgaaaaccttgcctaagagtaccaagttagtatgtggtgcagtcaggatgtgaacccaagtctatatttttgtatatggcaagtttttgcctttttaaccccatcttcataggctggtcctcctttcctctcttctttccttcttctcttcttttatgactacataagactatttagggactggcaactagatagcgtgtttaaaagatgacctttaaagacgacttttctgaagtttagatgtggcacataaaaatatgtatgtgtgtatatactatttctttaggtattgcattaaagttactttatgaaacaaattgttaaactttcaaaagaatgaatttgtttagattgcaaatttattgaaaataagttaatttgttctttgtagttcttagttattggccgcaggtgagccagattgcggaagatggaggaattaatgggattggagacagaaatttactgtttgatggtgagagaggtgggaggaggtgaggaaggcttttggtagttaatgggggatatatttagcatatgacaatttgggtgtgtctgtgtgttctctgggttgtaactcctttagagaactgtttctgtatccacattcttggaatatagtgtagcatccttcaaaaggtaactacctggtcatatttgttgatcatgaatttatttaaactctttttcaacaagatgatttatcaacatcatttctaaattctctaaacattaaatctacacaagaacttaattttgtctgagtttaaatgtactrtggcccttcagcatggctttggaatccattcaactgtagttcagatctacacactggcactttaactatgtgatcttgaactaattaccactttcggctgctttttcctcatctgagaaatgaggatataatacctcttttattgttaggctgtcttaggatgcagtgcaaaaacatgtacaattttttgtgtaacaaatgtagagtgctttgatatgatttaagcactcagtaaatgctttctagaaaaacattaacttcatatattatacatgccaacactacagtttaacaaatttgatttaaaatagtgtatgtgatatgatgttataacttcaagagcaagtatactcagttgaaatatgagtgaaaaagtagcctttgaataaaaaaatgtttctttttttgtctttcccaccccaggtcctgagggagtctaacaagttagcagaaatggaagaaccacccttgcttccaggagaaaatattaaagacatgggtccgtaatggtattttttgcttaatgtccttctccgttctactgtgcagaatgttcagtactctcagcatacagagaataaactggctgtcagagacacctcctgtctggcagaactctttacctgcagtcttcycagcatcttagtgtgttctacaaacgtaagcctagacccgctgctagtgtttgtgtttgaactcctgggaaacatgcaaattgaattatactttgcctcttctctggtttgttttactttctttaaaagtaggtggatttttgctaaaactgttgctgaagcctgtgaaggaaaattttattattttgaattactatattcagatattgagttgcctagataaaaacattgaattgtcaccttatacaagtaatttttcttaaaatatcttctcttctgtttgcttccttcatgtctttcttctctgaataaagtcaggttaatttttggatgaaatacatcatctccattgcatctgtttgtatgtagatgcccttctctgcccagcctaatacttataatatggactggaaactgaaaatgagcttacaagctgtgttttttttcctcatgcttttgttttgtttcatctgtgtgataatctacagatatctactcataaactctgagaaataaagtaatatgttagaagaatgaagtaaatgatttcttagttaatataactaccatgtttcattttgttaccaatcataatttttaaaaaggattttaaaaatgctgaattttacttggctaggtgtcatttctatgtgtaaaaacaagccaaaggcaggacctgtattctaaatggattattatttactaaatttagcttcctagtccttagcatgctatttgtcttttcttgctcttggctcttgattgaataacctctcagtctttttcttttccccagttagccttatatatacaccaagctcttgatctgaactacctacttacattttttcagaattggctattatataatgatagtagttattattattgagtgcttactatctcagtcattctcagagagtatattcttgagaataacatcaaccccattttataggtgaggaaggaaactaaggcataggaagataacctagctaataaggttatatctagcattgtgacaatttctttttcttattctgaacttaatgccgtaattgcagctcccattatgaaatatggctttattaaagaacttcaagttaccactcagtctcatttgttggctcttcttcctttaatagcaacacgccctaggacttcatccttgacccatttcccttttccctcctgtatactcttttcggttgaccatatctaaatttgtaacatcacttgccatatattggctgatgactccaaaatttgttatctccagtgtgaacccctgtcctaatgtaagtaaacaaatgcctctatcttaaacacacatccttgaatatcccataggaaccttatacccaacatctccaaaatggaaatcatcacgtttaactccaaacttactctttttcttgcattctctctctcagttgacatcaataccagctgtccatttactcaagtcagaaatctggttgtcgtactagactgctctttttttcttttctggactcttaacatccagtcagtgtctaagaatttcttgtatttatcttcttttctccattgtcatgatctcttgaggaatgatagagggtacagaacaaagcaaagactaatgatgataatagtaacataggtataaacccttgaatttttgtattgtacttagaactttagaagcatctttatatgtatattatctcatgattttagaataaaggggaagatgtaacagaaaagcactggccyragaatgacattcctgtggtgggatataggataataaggctgagttttcttacatgagtaagaaaattgactgtggaaggaatccagaaatgttttagtaaccttgaataaagcttttctagttgaggtaaaaattcataagggaaaaatattatttgtgcaaagcaagtttgtgtatttttgtataatgatgggttcatttaattttaaaagcttccctctaaatgaaatatgcattcgaaacgatttaaaaaagtagtttatacttaaaatgttcctaagggaactattttgaaggttagaaatgattgtgaaaagatcagtctcatttcaaattccatacaaagcagccagtccttcgaagtgttgaatgagaagcaaagtcaggaggttgtaataccttattaaatatatttcatggccccaagttttcccagaagcccgttgaaagggtcttagaaagttgttgctccacagaattgtcccttacttccttggaatgatgaagatactcctttwtctgctgatttggtgtaataatgacatactaggaatttatgaatattttaagatataaaaaccatgtattggaaattatgaactgtggcattttaaataatattttgagatactgattcctaagttatcctgcataatcagttaatgcatattttacaaaacataatgccatgtagatccattgtttatttgataaaacattacttgtgattatttctttacaaagtctggcattggttggtcagcagtacaatatcctcttcttatactgttatttttctaagaaattatattttaaatgtgtgtcatttcacctgtaaaattttccccataagtattaatcagatcaggmgtttgtggaataacatatgttttggacattgcatttttagaagaatgttgacaaactggacaggaaattggtgaggttacatagaaactgcaatgagatgatggcgactgtgccttgacatgcttattgttgataccaccattaccagtattctttcacccgtctctgctgcagctacccacacctgttttatctagccaggatagtagcccctttgtttacttccattctgtctcatgggatgagaagtccctccaccttttcagcctatcccatttaattctgtgtttcttccccagattagtgcarggatggaagcttgggttgtaggattctgaggtctctggaaattactggttctgttatttttcagcataaattagtctaggaatcataacaattttataagatgakatagcaggttttaatagcacataatgtatagtaaactgtggacttcttgctttttcagccaaagatgtaacttatatatgtccattcactggcgctgtacgagraactctgactgtcacgaattataggttatatttcaaaagcatggaacgggtaagagtcagattagatttttgtatgtacatgagtgtgttgtttgtagctagttttgttcatttctgatcatttctaattaaagcatttctgattaagattttgatcagctctataattggacagtattaattgctcagttttaattattttttctttccttctttaggatcccccatttgttttagatgcttcccttggtgtgataaatagagtagaaaaaattggtggtgcttctagtcgaggtgaaaattcttatggactagaaactgtgtgtaaggtaaatgttataatatgtatgtgattttctttggtttgaaaagctttgtattaaatagaacctctgttttgaaattggtttctaaaatataaaatggatttccaattagaaatgttattttagtatgacattgatagaagaaaacaaaatttagcagtaatagaaaaggtgattcatgaattagacttaattcttttgggcccagttcagtctacatattttgatatattcacaaattcataacttattttttaataatgatcatcttggccggacatggtggctcacgcctataatcccaacactttcagagactgaggcaggyggatcacatcaggtcaagagttcgagatcagtctggccaacatgatgaaaacgcatctctactaaaaatacaaaaattaaccaggcgtggtggcgggcacctgtaatctcagctattggggaggctgaggcaggagaattgcttgaacctgggaggcggatgttgcagtgagccaagatagtgccactgcactccagcttgggcaacagagtaagactctgtctgaaataataataataataataataataataataataataaccatctttaatgcacatagtactgataggataccacatagttccacattgatgatttcactttgagccttataaaaatcctgtgaggtaggcacaatagacattactacctttaatttacaaattagcaacataaggctctgagcagttccactacttcgtagtggaagaactaaataactaaatatgttatattcatcatcacctatcttttctgtttctagttctcataatttttctttttttttttttttgagacggagtctcgctctgttgcccaggctggcacaatctcagctcactgcaagctccgtctcctgggttcacgggattctcctgcctcagcctctcgagtagctgggactacaggcgcccaccaccacgcccagctaatttttttttgtatttttagtagagatggggtttcaccatgttagccaggatggtcccaatctcctgacctcgtgatctgcccatctcggcctctcaaagtgctgggattacaggcgtgagccaccgtgcccggccagtttttctacttctaaaacaatagtgtggaaaagttgatattgtagacttttcttatgttcttatttactggcattctttaaatgcgttgatacttgaatgaaacatagattgttacatttttaccattaagtcataggtatttaattctaygtaccacttctccaggtcactgttattaaggcctaattaactaacacccatgcacattgagattctacatcacattgttcytttcttttyattctgccagtgccaaaagaaacagcatgtgtataattcaagatactttgttatgctaatcttagaagttttgtgactctggtattaaagctaatgacttagtaattatttttgtagttttctttttttttgagacaagagtctggctctgttgcttaggctggagtgcagtggcgtgatcttggcttactgcagcctctgcctcccgggttcaagtgattstcctacctcagcctcctcagtagctgggattacaggcatatgccaccatgcctggctaatttttgtatttttggtagagatgggtttcaccacattggccaggttggtgttgaactcctggcctcaagtgatctgcccgccttggcctcccaaagtgttgagattacaggtgtgagccactgtgcctggcctgtggttttccattatagtcagaagggctctgtgagtgtaatcgctggcaaccatgtgtcaagcacactgtttcctgatcacttttctgtagtttaagagtaagtagtgcatagaatataagacgatgtgaaagaagataattttgaatcttaatcattttaaatataatttctttccatggaacaggatcgttatcaataaacaaaaatatttgtagggcccctgacatggtactttcagagaactctgtggttaacagaatgattctgagtatctcacctagttataaagatatttactgagggaaaacaagatatcagcttaggttcccgcacatgtttattttaaaagatagtaaagccagcattctagttttggatcatatactgtcttacttatgtattgtgggtacactgtagtggagaggctttgtgtgtggttctacaaaatgaggcataataaagctattttgaattctgcctaggtaaaaacatttaaataaaatgatcagtcttaaaattattcttttcttataaattttttttaaaaaattttttgtagagacaaggtctcactatgttgcccaggctggccttgaacttgtaacaattcatgtttcattcaagtatcaatcaatgcatttaaagaatgtcggtagataagaacataggaaaagtctacaataccaatttttccccaccactgttttagaagtagaacacctcaagtgtccctcttgctttgtccacccaaagtgttggaataacaggcatgagccactgtgcctggcccttgaaattatcttaatccccagtttttttctaagtgctgttaagataccagtaaaccggaacatgaataactgcattcagtctgagcatagaaaactgcttagggacaaatggaagggaaacttggtctttagaccttactgtagagcctggataatataaactaaactattcagagttatgtgtcagtagatggtggaagaatgtggttatggagtgaaggaaggaacactttcaggcagggtttagttctatcaagtctactagtagcaggggacttaggaagagaaggtccaatgcaaatgaaccctgggaagggatagttagtaggaaaataatcaccagatataatgaactgaagacacgtatgaaatgtaacaactactaatcaggttttataaataaagaaatttatgacagaaaatgggctttcacagggaaagcacatatgctgatagtttgtatcagtcatgatattaatcttcagatgtaatatcgttaatctccagtggttacatcaaatactacctctttcactggcctattttgagtccataagcataggtaaatttcctgccctctgaattctgcttcatagtagagtaccttgtgtttctttcagtttttcccaataaaccattataatttccctgtctccaggagctgatgtctgatttatttttgtatcccacattcacagatcttaacattttacaagayagttccaagtaaccttatttattcatttaagtaagtagtgaacaattattaacttggttcctaaatcttttctaggatattaggaatttacgatttgctcataaacctgaggggcggacaagaagatccatatttgagaatctaatgaaatatgcatttcctgtctctaataacctggtaaaatgtttcctgtctttggaaaatttgtgctataattattgatgtcgtataaagaaacttstctaggctgtctagaatctctacatttacrtccctgctttgacatttaaccagatgtatagtgtaagtgtaacttagtctcttagatcaatttctttaggtatgaaataaaggaagctggactagctgatttctgaggtccattccagcactaacattttatgattatatgatcttgctattcagggtgtttccatgatgaaaagttacctgttgtcttcattaggatttgtaatctcctttttaattgggagccagttaacactagcaatttgggagggaggtaagggtaggcaaaccctgagttcccactatgtgctttagacagtgttagactcccacgtttatatcatttcacttctatgtagcctatggtggtagatattatttatccctgtttagcgatgaaagcaacatcaggtaagcagttaactcaagggcacagttagtaggagtaccatttggaatcaacgttggtcttatgactccagttcaaatttttttcacatcatagttgtgtttaaatgtaatgtctttatttgaaagtaaacctacaaaggctaccaaggataatctgaaagaaatacaatgatatgttggtatttgataagttttgttggcaagtgtctttgcttttttgtatgcttaaaaatatgtaaaaaaatagattttcaaaatgataaaacaaaaactataatacaaaaaaggatgctaatacataaaatgttcttgcagataaataaatgaaaactttggatatatggatacatttctgattcattacctttgtgaatatcttttttagctcttaccattgtttacttttttgtagcctctttttgcttttgaatacaaagaagtattccctgaaaatgggtggaagctatatgaccctcttttagagtatagaaggcaggtatgtactttcttctctttcaattttagtattttgtattcttttcattccaaagaaaactgggtggaaccatgtacgaaaaccagcatatctcataccacagtaattcaccacattaagagattaaagcagaattcaatcttgaaatctgttttagtatatcattcttcctattcttccttcagtataccacttcccaaagagtccctatactgcattacttaagccccacctaaaatagtcttttctttatttttaactttcctcctgtccactatgctttcttgagaatttaagacatattgattatttcttggtaatcattagatttgttatctagagtattctagaattcaaatatgaaaattcttgagcttttacttttgtatttaaatttcaaacgtagcattttaattataacatttctaatttattgtggttttgtttcacaaagccaggtagaggtaaagaaccaccaccagagagctaaagatatctaaatgacttgaagtggggtttgttaccacacttacatgtggaaagtgaagttgaaatttcctcattcagttataaagttatttggcaaaatatgaaatagaatacaaaataagtgggaatcaactaaaagccaagagtatacaagaaacaggagattcatgctaactcaaaaatccagtgtcagaagaagatgactaagcaaccaaaaagtctagcaggtgtctttagaaattataaaaatgaggactactctttgagaatctgggaagaaattgctgtcccrggagcattcagtgtagaactttggaaagcaggtgtctaaagaaaagaggtaaattattactgaaaaaaaataagttgaagtgtaaatgaacaactatacccatacagaaagagaattaagagattaggaattgtggcagtaagaatagagcattagcttctacataaaatggtatggatgctttatggtctttgacttactagatgaatttgttggcttttttttttttggcagcatgagaaactgtctctgagtcaactaaamggtctaatggagaggacactgtatttgtagttagaagctgtrgttttaagatttttttcttggatatattttaagtttattacagaagaaaatgaagatgatctcttaaaattaaggactaatgatwaagcatcagattattcacttccccccctttaaataaaaaaaaaaaaggaagtggtaatacttgcattctgtacaaaattcaaaaggtccagcagggtatactgaaaggtaggttttccttgcaggacaaccctgtgtccccctagccattccagttcccctccctttaggaaatgatattattggtttcctgagtatttttttcaaaggtttcatgcctacaaagcttgtgtatatatgtgtgggtattgtttttttaagcatatggtagcatgccatgcacactcttctgtgcttttctttcttcattaatatattttggagatggtaccatcttcaaacatatagacctttcttttttttaaattgagatgtaactcacataccataaaatttactgttttaaagtatacagtccactgctttttaacatattcacgaaattgtgcaattaccaccacactctaattctagcacatttagaaaacttagttttgaattttagctctagttcttactctcacactcagatgtaggctcttgaatgaatcatttatggcacagtgccttcattttttacttggtgatagataccacgttatgggatgtttgaaggattagtgacatatagaaaggcactttgtaaactgtaaaaatctatccaaatgatgattattatatttattacattgtgaggctctgaaaaacagatatcatgactggctttatcatgtgctgccactaaaaaaatgaaagctacattcattcaacagatctacacttaatagtsttaaaagaaattagactatatctcttcaaaaatgggcaaaggctgggcgcagtggctcacacctgtaatcccagcactttgggaggccgaggcaggcaggtcgcttgagcccaggagtttgagaccagcrtgggcaacatagtgaaacaccatctatacaaaaaaataaaaattagccaggtgtggcatgcacctgtagtcccagctacttgggaggctgaggtgggaagaccacctgagcctgggagatcaaggctgtggtgagctgtgaatgtgccactgcactcaagcttgggcaatagtgagatgccatgtctcaaaaaataagtaaataaataaaaatggacaaagttattaataaccatttaggtttgtcatataggagaatgtttctttaatttactcttgaaggacatatacagtatgtagtgattatagacaggactatggagtttgtggataaggccaagaaaaatcaagtcatctgggcacagtggctcacacctgtaatcccagcactttgggaggccaaggtgggaggattgctcgagcccaggagttcaagacaagcctgggcaacatggtgaaaccctgtctctaccaaaaatacaaaaattagccaggtgtggtgacacatgcttgtagtcacagctmtccaggggggttgaggcaggaggattgatggagccctggagctcgaggctgcagtgagccctgagcatgccactgcactccagcctggatgacagagtgagaccctgtctcaaaaaaaacaaaaaggaaaaatatcaagtcatgggtaaaaatctgtataaagataatgagcagtccagtacagtggttcacacctgtgaccccagcactttgagaagccaaggtgggaggattgcttgagctcaggagttcgacaccagcctgggcaacatagtgaaaccctatctctacaaaaaatacaaaaattagccaggcatggtggtgcatgcctgaagtcctagctactctggaggcggatgtgggaggattgcttgagccctggaggttgaggctgcagtgagctgtgattgtaccactgcagtccagcctggtgaagagtgcagagaccttatctcatgaaacgaacaaaaaagataacgagcacggtcttctgcagaaatacccaacataagttacatgcattacttaacaaacttggaaaacagttacttcagtcaagggaaagagaacttatccttagaactggaatgtaagtaactaagaaagccatggtcctttcagtttgtttgtataataaacttgaccctgacaagtggatactgaagggcagtgattttgcttggagagtagatatataccaaagatcaataattgtcagtatatttttagtagtctacaaagagagtgtctgagggctagccaattccagttttctgcttgaaaggcagtttttagtgaagataggtgtgtcggcttatctaagaatgaggaggacaatagccatgaaggtaatctaagtcattggttctcattcctaccccaccctgctacttacgtgaataatgtgacattccccatgagaacagtggttctcctggtagtgtttttacaaggatatgggaagtggggtgggagagagacaggagtacctttmtgggttgggggatggtacattaggccctctgatgtatacttctcaagtgatctgacctttagctctgactccatgttttctaagaaaacttcagaaactaattttgcttcatrtggaaacttcctrtggttcactgatttattcattcatgcatttatcaaattcatataataccttctaaatactagtggctaaaatatgaaacaaaatgataaagtccaggttcccaaagagtttgtgttcagtggagcattcaaacaaatagattaacaattacaatataatgtaatgaatagtctgatagagcaagtactgtagggagagaacatgaggccatctgggagctgaaagacgtttgatatagactagaccagagcatacagtggcaagggagagatctggagaaagcaggattgtagagggctttgctaagtctggtaaaggacttcatattttatatgaaaagcaataggtagccattgattttaagcagaggaatgacataatcccttttgcatcttaaaagattactgtggaggcagtgtagagaatggattatagagggacaggagagaagtgataatggcctgaattagggaagtggtggtaagaattgaaaaaagtgagcaaacttctggtatttctggaggaaaaatcatagaaattggtcactgactggatgtaagggataagggagggggaggagttaaagatgataaccaggtttcttggttgaataccatctctttaaacttgccaattcactgtactttttagtacagcatgtgaaaaaaatatataagtatatatatgatatatacatatataaaaaatatgaaatatatatttttcacgtgctataataaaaagtacagtgaactgtgtatatatatatatwwwwtatataaatttttagaatctcgccgtgtcacccaggctggagtgcagtggcgtgatcttagctcgctgcaaccttcacctcctgggttcaagcagttctcctgcctcagcttcccaagtagctgggcttacaggcatgagtcaccatttctggctaagttttgtataatagaaacggggtttcatccatgttggccaggctggtcttgaactcctgacttctagtgatctgcccacctctgcctcccaaagtgctgggattacaggcgtgagccaccgtgcccggccagcacgtgaatattttgttaaaaacctctaattaagactgtagttctggaaataagtcatgggtaaaaatctgtataaagttaatgagcagcctggtgcagggtttaactttcatcttgaagttgtccagaatatctgaagtcaacgaaatcaggagggagggaaatatgtagaccacagggagcaagatgggaccaggctaattatatggagtaaacaggatgtaaggtagtaatgaaagaacagttagggataaatagaagcgctattgagagtgtttgctggaagggaattttctttcttaacatccttctgggtgtttggaaacagcttgagaaatacttctttaaaggagagtacattctgctctttgagatttttacaacaatttagtgaatacgatagtaaatttttcttgaggaataatgtacttttatataaaaaggatagatttggaatgctcatggaattctctactacttcctaatgtatagctttggccaaattacaaactgtgccatagtttctttatctatgaaatgaagttaatgaaacctgagtacagtaaaatatatctgtgtgtttgggtgtaaagaggctggcaaagtgcctacacatagtagatgctcagtaaatgtatttttcactttcaattctgtctttttctgtttgataagaattttcagagatcataaaatttaagatagattttcttaagtccaaccatttaatataatagcttaattttgtatacagtgaaggatggaaaatttcagttgttttattaatcctatatgtgaagtagtacactatttataaaatagcagatattgaaggagcacgagagctcaatagttgatatgttttttaaaaattgtttcaagcatttttcttgcctgttgcctgttgtcattttgccttgcattcctcccttacttttctaatatattttagattagcaacatccattagtattataatacctcagtgaaaaatgtactttacgtatgtaagygatagctgtgcatgtagcactctggtggacacttggtgcctgacttctgatatttatttgtatagatgaatggcaacaaagtcaatcatccagtcaaactgaatgagaccctgcactttgggaggctgaggcaggcggatcacctgaggtcaggagttcgcaaccagcctgaccaacatggtgaaaccttgtctctactaaaaatacaaaattagccgggcatggtggcgcatgcctgtaatcccagctacttgggaggctgaggcaggagaattgcttgaacccgggaggcagaggttgcagtagccaagatcgygccattgcactccagcctgggcaacaagagygaaactctgtctccaaaaaaataaataaataaataaagaataggaacatttggccaggtgtggtggctcatgcctataatcacagcactttgggaggccaaggtaggtggtcaggagattgaaaccatcctggccaaccccgtctctactaaaaaatacaaaaattagcccagcatggtggcgtacggctgtagtcccagctactcaggaggttgaggcaggagattcacttgaacccaggaggcggaggttgcagtgcgctgagatcgcaccattgcactccagcctgggcgacagagtgagactctgtctcaaaaaaaaaaaaaaaaaaaaaggaatatttgaagtcttactgtttccttccacctcctgaatatgcttagcacaggtccacactgaatatttagtgaattaatgtctgttatattaacatcaaattgggttccacaaatgaatacgtatccctacattagaatatctaatcctgaaagcctgataccacaggctgacaacaactatcccaacactttaggagatggatagtagaggtcagagagaytgaacaggatggcttctgtcctggtgtcgtttaatattttagttatatagtaatttgtcttatgtttcatttcacatgtagggaattccaaatgaaagctggagaataacaaagataaatgaacgatatgaactttgtgatacataccctgccctcctggttgtgccagcaaatattcctgatgaagaattaaagagagtggcatccttcagatcaagaggccgtatcccagtaagtaggaagtttggatgagcctttgcaagtgcttttttactcaacataatgctgagattaatgagtaggagaatggattcaggatataaatagctacagcagcaggtctttcatggggatattggagattgatttatttagtaaagttaaaactggaagaaagacttaaagaggcttccagagagtgtgatatgggtattagataactgcacagaattgcatgattcttcactgaaaaagtttgctgtgtgtattagtcactatttatttatcttattgtatattctttagtcatgatgataaatgttcttttttttttttaagtcctagaaagaacaccttacagatttataactggatcttagaaagatgagcttaaataattttaggtacaaaattcatagattctaaaggcttttagaactgagcagttttactaatatattaagtggggtttacttagccctgtttcacagtatttttttcaggagataacatttcccaataatcaaatactttcctaaatcagtatctgactaaagaattagaccaagttttccacatcccagaattggcttgaaggaaaggtgatgatttttcttagcagcctcagatgtcctttcatggccaggcttkggatccaattagaaagcagagctttactgagtactgttttkgagaattataaacagagaagtatgtaaaaggtgtgttaccattttttcctcattaaggttttatcatggattcatcctkaaagtcaagccacaatcactcggtgtagccagcccatggttggagtgagtggaaagcgaagcaaagaagatgaaaaataccttcaagctatcatggattccaatgcccagtctcacaaaatctttatatttgatgcccggccaagtgttaatgctgttgccaacaaggtcagatggtctcttagtaattataattatggtttcatgaatcagctgagtttggcagggccacagtgtagtaaaaagagctcaggctctacagtggtaaacatataggttcttgtcttggctcttcaacttgatggtgtgattttgagttagttatttaacctctttagacctcaatttgtttattggtaaaaatgagaataataatagttaacagtgttgttttgggagcaaaaatcatttaataaaaaataatgcataaacttttgcttacttacataataactaggtgttcagttattcttagcttcccacttctccaaagttgacaactaactgagcttatgactcactgaagtccctgtatagtactgctctaggaatagcgaastagtgttctcggtgactagtggtgccctcttctgaccgtcctccacctgaacaagttattcagactgaagaattggcagttagctgtagctgattgttccagcagaataaatattagcattgtggaaattgaaattttggttcagttgaccaaatctataggaggagggaaggagagagaagacataactacagcagcaggtaccattactgaaaagcgctcatcttttcaagtgtacatttcagtgcttttagtatattcacaaagttgtacaaccatgccactacctgaatccagggcatttttattctatgtgtttcggtgacaggttctgtatagttgttaccactgctgtctttctagaatgttgcaacaaatttgaattgaaagttcctgtcttattcccactcttcagaagtaatctttaacaggtatcccttgaaatactgtaaattctataattgtgccaaacgatttcccagactctcagtgtcagaaaggaagctgaacttctgttctttcagtagtttgttgctggttatgagttggtggttttgttgtttcaaaggtgtgggtcatatratcacttaattttgtataatttactgctccagtattttcctaatttgtttctattagggctctaagaagtataattttacacgagttaggtaggagatagaatattttattcatgaaatataaaaagattaagtccagaaaaataaggttcttctttctagccatagcttattttgaacaccaaatattttctcattctattttgtagatgtagatttaagtctttgagaacattgatgatgatagcattctgtgcttttatccttgttctgtctttttatttaaagagaattatgtggttaaaaaagaagcaggtcattttgattgcaaagagtttattyctcagatatgaagattaaaatgaggtgaagaggcagggaggtgaagaagcataggtgaaccagacatgtggtctcagcacatgaaacttacagtctggtaatttcagtatatatgaaaggaagtcatctgtaagaacttatgtttgggtaggacttggcgtatgggctgggaaaatttagtgctttacagtgtttaaataccttcctatgtgtttcatatttaattttaataatggccatatgggcaagtcagactacgtatatattcattttgtaaagaagaacacaagaaagcgagtggttgtgctaaataagttgtcctgagccatccacattttcctgtggagttttccttgtctccartaatatgtatcatcttttatgctattggatattttatgtcacttgtttacagatgtgcattcatttatgattttccatgatgtgtgcttttttccaggcaaagggtggaggttatgaaagtgaagatgcctatcaaaatgctgaactagttttcctggatatccacaatattcatgttatgagagaatcattacgaaaacttaaggagattgtgtaccccaacattgaggaaacycactggttgtctaacttggaatctactcattggctagaacatattaaggtgggtgtgtgttactatatcccaaacaaagactctctctacccctttgtttatattagctttttacttataattgcaatcaacatgaaggtacctttctaaacaatgaaaaatgggtaaatgctttgatacttggaactactagtgaattttaatgtttgaatgaattggttttttatattgtgcatttggttatgttgtatttcttttgttccccctcccatcctatctgaattcgaaccatccttcagattccagttcatatttcatttcttccataaggtcttcccagattgcatccttttccattttctctgaactctttaccctgtctttccatctaatcaggaactagcgtgtactttgtttgcttttgtgtgtcaaccaacgtatattgctaatttatggagaccaagactggataaatcctacatatatttttttgtcctctcaggagctagggcagcactatccgtgtgaataggtacccaataaatattagttgatttgtgaagttaaaaccattctgatcagggaaatgaggtggagtggytgcatgagccacactgagtgctaagtcattcgcagagcacatgtcagtgctaatttacctaacatgctaatttaatctagttatattttcagatatggtctgtcagtaacataactcaccaaaatgtagacttatgtaaccacatatataaatattaagaggtaatgggaaatgcagtctttcacgttaagaaggaggatacttctgctcacattaaaatctctgaagttcagacagaattgaagagaaaaccaaactgaataagaattttaaatagaccatttttactattgtttccctttgagaagcttagaagcttgaaaatcacaaagtataaacactactcagagagcatgttcatgtggcccattcattaaattatgtgaygtgtaaatatacagccttaggcttgatttggaactaacataaatcgctgtgtttgattctgaaaactccagatatttaatttgcagtttcaacatggtctctaaaaggctggctataacagaatcaaatttccctagagttataagacatatagttgggctaaactactttattctcccccaatccttatcacacaaagaaagtttatttactcaatcactctcttctggtctctgctcaaatatcacctttctgagagagacctttcccagcctctttacaaaataagagttctaccagcattccctrtaacttctatggagcgttttcacttattgccatctggtatactgtatatttccttgtttatttgtgactggtgggcctcacccaaatagaatgtaaacttcagtaagcaggaactttgttccctgctgtatggcccgtgcctagagcagtatctaccttctagtaagggactccataaatgtttatttaatgaatgaatgaacaattactactttggataactcttcctgatcaatcttaactaagcctttgggttagtgattcttaacttcgtatatgcactagaattataggtggaatttatttaagatactgaattaggatcattggacaatgaggtctaggcacttcaggcttacaaatgactcttgatatatagtcaagatcgtcatagtaccccatttccagaatatgcttatagctgtgatcaaggggaggttatcatacttccaagcttaataatctgttttctttcattctcatctgcgtatgtagaactatactgtttttcaagtataatacaatatggccattgcagagaagaatagggctgtattgtcctttttttttttttttttttttaagataccatacttttgtgtttcttttttggttatatctaattatgtttagttttaactcaagattgacttcagaaaaggtaagttatttkgcaaaggatttctgcatatttaaaaaaataagagctgaagttattttaagtaacagattgacatattctgtgaattttcatgcatagtgttacagaaaagtagctcactctaaagtttatactgtgcttgctgtatgctctgtgacataaaaatctttagtcaaaacaatacaataamtgctatagagtattttaaagagatccagtattattgctttcaggtrcttatcccaatttggtttaagcattgttttaaatcataamaaggcttcaattgctatatcaattatttttatttaaatagatgatggaatatttgattcttagaaacagatctctttagaacttttctaagaagaatctwacaccatgatttatgtagcacccaaaggtacttttgatttggctatttcgttgggcaaattaataggagtcagcaattatgaggtttttctagttttaaaagcaaaatttatatatcttctaccattwaaaaaaattcttcttaggaagggacaaatgtttttcctyatgttattgaaataatgatccctgataagctgtattagtaaattttgaagaaggaagtatttaccttgtttaaaaacaatgtattaaaaaatctgttttccagcttattcttgcaggggctcttaggattgctgacaaggtagagtcagggaagacgtctgtggtagtgcattgcagtgatggttgggatcgcacagctyagctcacttcccttgccatgctcatgttggatggatactatcgaaccatccgaggatttgaagtccttgtggagaaagaatggctaagttttggacatcgatttcaactagtaagtaaggaaccttgactttggatatatcacatgcattcatgccaaggcatgtgaaaaaaatgtgttttttaaaataagatattcatctgaaattgatcatttatctagtggggtaaacgtttttgcttgttttggaaagcattaagatatccctaacatgactagtctggagtcagagctagctrtttstcaagtgtctgacccagtcttttctgtgatctccactgggaaacatcggatatcattcagtgatgtccacgggtgtttctgggcaggcgttttcctaaataattgaaaaacttttagaagggtctttacccagatgctgtctgtaatgtttacctttagtatccagtagttaccagagtatactagcagtgtttatacagttgtcccttggtatatgtgggggcttggttcccagatcccatgaacaggccaaaatccacacatattcaagttctgaagctggccctgctgggaccatgtaaagttggccctctgtgtatgtgggttccgcatcctgcatttggctgaaacaaatctgcatataagtggacctgtgcagttctaaccgtgttgttcaagggttaactgtaacatgaaaggaacagacatttaaagttagtctgctcttttgaacttgaactgttaaataaaattgggtacctggagtgtttattcagatggctcacattttgccgttctctacacaatgtacttatcatgaaacggccatttaaaacaaactcgtacttcaaagaatcaagttttagtcagccaaagctgcacatgtttatataaatgtgttcaaaatcaaacattttggggtgttcgaagttgctatggattcctaaattgctaactctggttacctactccccccgttctttttacctagttatattctgaaaatagaatcttgacaattaaagggcacccagtcaagaggatttgctcacaaggttaatgtagagtaatgattctcaaactttttggtttcaggaccccctttacattgttaacaattatggatagaacttttttttcctaactccccaaacttgttacccagagaactttatgtgagttatatcaatatttgccatattgaaaattaaatttgaaaaaatttaaaaatatttcttaatttaggaaataagcttattatatattaacagaaatatttaaactaaaaaaaatattttccaaaacaaaaagtttaatgaaaagactggcattgttttacttttgcaaatttaatgagtttggcttaatagaagatagctgaattttatatctatttttaccttcaatctgttatgttttgttggttttagtatatgaagaatatctaaccatatacagatatgtaagtggaaaagcagaaagtattttaatagctttttcagggaattgtagatattcttctttgatactacrccagaacttgataaatggtagtttcttagaggttagttgttatatggaatccaaaatcaagttaatgaattttttttatcattaaattccattggtctcacttccattttgaatagatcttttacccatgtgtggttttgtaacatcacatattggttatttggaaaatactggcttattgagttacacagatcttccaaatgtaaatgcatttcatcatataataccataaaatcacacttgttaatcatcaccattggttttgtcagaaaagccttcaagtatttttaagctcattatggtgggcaaaagttcaccaaaaattgagttttcactcaaaagcttgaattttttcattgacaacaaatattgtcagctgttttcctttcagtgataattcacattgtaccttttcaaaaaaaaaaagtctttaagtctttctaaccacaatgcatacattaatttttctttcaagtaaaaatgatgagaaagtgctatctcctaccatactacatgcagtagcaaagagttaacacatatttcccgtttkgtcacacaggccattaaaaaaaaagtgtacttaagggatgagatttaataaaatcagtaatttttactgcgttgttaagtacactggcataagagaaatggactttttttctttaatttaactgtgagtgtctggtagggtagaatacagtgggtacgaatgcagttttaattataagcattgccctgcttgatgcctgcaaaggcaccagaatttttatccttcataacttctgcatcattagtgcaaatgccaacacactgaaaaaggtaaataatgtcttaatattatggaaatagttttgacctcacagcccttggatgtttgtggaccacacttttagaattcctgctttggggtaaggagcaggattctgttttcagttatctgagtcaaaggtcctcagaggaaataactgagaaactaggtagatgactgcatgcttggagggtggatgtcaagcatttttgacaggttttctaagatgtgtgctaatatggttcctcctgatgaagacacattagtgctaagataggagggggtacccttcactcagtggtcaagatatgaacagagaatggtgctttctgaggccagtgtccatgtaacttatttctcagagagaaattaaaatctccaggacaaaaatctggcctctgaggttctgactgcttccatcttttattagcaaccttttaggatctgagtttattaaacagagtagtaattcatattataagcacttgtgtcagaaaatatctgagcagtttgcacatcaaaatgtttctgcttggcaggataatgggtgattttttacttactttgcaatgctctttaaaagactttctgaaaatttttatgtatttgagacagggccttgctgtcatgcaggctggagtgcagtgatgcgaccrtagttcactgtagtcctgtacttttgggcgcaagccagcctcccaccttagcctcctgaaagctaggactacaggtgcacgccaccatgcctggcttttaaaaatgttttgtagagatggggtcttgctatgttgcccagacccatctcgaattcctggctccaagtgatccttccaccacagcctcccaaagtgttgggattacaggtgtaaaccacagcacccgactttgaaaatttttagactattgaccaattatttttttaaaaaattatttccatcaaaacatgaaaaatccccctaagttcatatatttcactctttttgcttcagagagttggccatggagataagaaccatgcagatgcagacagatcgcctgtttttcttcaatttattgactgtgtctggcagatgacaagacaggtaatttatctggcctatgtattcttacacatctcctttcagttttcctgtcagagtggggagatttggtcactgattagcctatagatcattaaatggaaattcttgtaacatctccatgtccatgtgagagctatttattgtcacattatgaatcaggttaaagattaacacttgaaaatttgattctattagtatttcagtgagtagcattgataataactcctgagaggttttatcatttgttttgaacaaatagtgttaaataggctcacctaaaaacacatttatatattgctaagagtggagaaaaaataagctaggtaccgcaagcaaaataaaatattttaagtaactttaactgttaattttttttttgaatttcaatctgcttcttctgaaaatttttattttaagggaaaaatgtttatatagaaagcataacaagggaggcacatactacatccagttctttttayttttkggcatagagagagctattatggcttttagaacttctaacaaatttatttgaaatattaatataaatgaatttaatcttttggaaagagtagaggggactgagaaaacacctggtttattgtgagatcactttattaatgaggcaacgggtcattgtcttaaaaatatgatttaattctgactcaaaccatctcgaaaccctgttgaatgcagctcattgggagataattatttacccaagggtttattagaccccaaaacaactggaagtstgaattgtttttatttagattgccatatgaatttaaagtagggcaagtgctggctctgcctggctttggatcatatttatttaggagcatatttttagcttcaataaaatactgtttatttcaatacaagaaaattaatggtaatggggtgaaataatcatcaattatatatttaacagtcccttgcctccataagcatttctacttgggtgaattatttagaaactgttgggttaaatgaagcatttttgtagctatgactatgatatgatgagactagtattttagcatatatactgaaaaggtgtayacaattcagttttggtttataaatcagacctttggtgtgttgggaggtaagaggaaggagaggtgcagtgtttaatactttcttggattaggtttgactttttcctttggaattggctttgaggcagtatatcaactacmtaagtccctacaatccttttttggatgtttgacccaaaacattaggaccccacttttgactgttaccatattcagtyttaaatarcctttgactcttggtagaaataaaattcgccatcaaaggagtaggaaagctctttgaaactgtggtattgttgatggttgtgtgtactgctttccaaggtgaataccttgaaggaaacgatgtgtttgaatgtatcagttctgatatgtttgctagaaaaaaagcacatttaccaatttcttgcaaagaagagtacacgataatctatagccaaccaccctgaatgcacccatctcatctgattttggaagctaagcagggtcgggccttgttagcacttggatgggagaagaatacatcataatacatttcttccttagtaattttaattttgttaactttatatatgctgtctatctaaaagtagtttaatcctaattttgagcctggcactaaataaaagaaaatcagtttaaatctgtatttttgatagaacctaaaatactttgtagccatctttattttatacacctagtgtttttctgtatattttcttcctgaatataaagcatattaactagtcataatgtttgttagcaattatcagttttataaatacttgaatactagtacagagacttgaatagcacatttgtcaaaacagaaccaactatgttatgacagccagattctatacctctcctcctatttccatcctcatctctgtcacctcagccctgagatcaggaagcaattgttgaagggccttttagattttaaacatgtaaagaaaacaaaatagttctcttctgctgagggttttaaaagcaatagctgcagttaatgccctgctattttactttctttgtgaggaaatgcctactgattacactgtcttctcataactgagctaacagttttgccaagaagatgaaaaactaatcgcaggcttagatccttgggattgctatttagtgattcaggatgcattcatatttcgctaataatagggctgttaagagtgtgaaaaataggtgggatttattttttaaaggaataaatgggacttgacaaagttttttacaattggttttgttgtggaaatgcttggtcatcttctgcttgatcatctgcttcattcagcttcacagccacaaaaatcaaggcctagtaagtgccctttcttgtttaggaaatctgtcatgttaccctgtctatacttgctaaaatgtaggaaactttaaggcaaagttgttttcatccatgttccatttacatgatgtttatactattttcctccactataaaggaagggatctaagatgtaaaagcttggaagcaatgtgtattttcacagtctgcaatctaaatatttatataatttcttatcacgtacagccctataattggtagaatcttacatagaagcttccaaataattctgaaatattagataggatggattaaacgaaaccttctaactttcaggggttcgtaatttttcatttgattagtcccctaaaattgtgttgtgtaaaactaagacatccagtcaagcccctggcttgggttagagagtgaattttctttttgttagatgctgccaaaatagtggcttacaagggactctggtttgatgggatggatgttccctgaaaagtttacgtcggtgcaaaagtaattgccatttcaatggcaaaagccgcaattayttttgcaccatctaaatatttaataggttggttgacttgtaaattatctgccttagatgtttacttttgtgtattgctgacattttctkgagacattattggcattttgtgtgtaatccttaaaaaagaaaaacaactatgttcttgaaaatttaaagaatcttaatgttgtttgtggtcattttgggcagagaatgcctagagttgccagaattgcctaagtcaaaattcagcctgcaaatttagggttagcagatatagcagatacagaaacatcatgatcagaaaagtgataacatgatttttgaaaagaaaaccatacgaataatgccataatggcttggaataatgtagatttgaatgtttaacttcattttaaatactacctcaaaaggatctacccatgacagggatgaatatgcttgaagaatgtcttaatttatgtgtttgtgatgtttgatttgcagtttcctaccgcatttgaattcaatsagtattttctcattaccattttggaccacctatacagctgcttattcggaacattcctctgtaatagtgaacaacagagaggaaaagaggtaaaatatgaaacatgaccttccccatactatctctactgtatacttttccctaaaagaatgtactctgtgacagatttcaactgaagtcattcttttgggtcatactttatcttacatgctataatattgagggcttccttccatatatctggacctgatatattctgaagtatctttgtcacaaggctgaaggtgctagctagctgtctgctgagttcatgagtgggaagtggtttctgctaaagagaactgaagtacgtgaaatctaaggagcaccagtgtaccaatttttcyatgtagaatggaaatcctttacagcaggtgcagaaaaatttaattagcagaaaatgtatattcgagtgaataggcagytcaaattcccaagtatatcctacttattgagacattttaggttaagtttttgagttttttaagttgtaaagtaataccataaaaaaattcaaatacggaaaagatagtatgtagaaagttaaagtttttcgttatcccttttccccaaaggtatcactgttaagtggggttggtattaagaagaaatggtgtaaggattacatttcaagttttacttctttatcaaaacttgtctatcctatgtatcaacatcttaatcatcttgattggtatctccctctgcatcaacttttattctaaaaaatgtggttacaaagtatttatgttttattttataaagcacagtaggaataagtacttgcactgaagcccagttgctgggttcaaatcctggatctatcacttactgtaacagttcgcttggggaagttaatgtctgcttttgtaaaattatgaagattattaaataagcaatacaaaataccacaagaactgctatgtagtatttcctagacttccttaaaggcaggtattaaatttttaaattcaccttatgtcttcagtgtctagcatgcagtaagtatttctatgcatagcaggcactcaacaacttaaggaatgttcattagaaatagcatagctaagtttcgaagagttttattttttgagagccttggggtaggaatcattgattatttttaaaaaaactttttaaattgataataatatgcataccatgaaattcactttgatagtgtatagttgactggtttttagtatatctgagttgtacagccatcacattttcatttcagaacatttcatcacctcagaaaacctgttaatagtcactccccattcacccctgccaaacactaatgtttttgtctctagatttgcctcttctggacatttcatataaatggaatcatttaatatgtaaaccttgtgtctagctcctttcctttaatatgctttcaaggttcatacattttatatcatttctttttatggctgaataatattccattgtgtggatatattttacttatccattcgtcagttgatggacttttaggttgttcccacttcttggctgttaatgaataatgctgctttgaacatctataaaaaagtttttgtacagacatgtcttctgtttgctggatatgtacaagagtggaattgttgggtcatatggtatctctttgaggaactgcatactgttttccagtaccctctgatcttaatataagttggtttatcactgaagtctccaagtccacttcctctaaagagattttaatgacaacaaagtacttcttcacaaatttcatctaaagtgtaaayggyttatgtggtggagaatctttacctatttttcctgcctacagaatcttcctaaaaggactgtgtcactgtggtcttacataarcagccagctggaagacttcactaatcctctctatgggagctattccaatcatgtcctttatccagtagccagcatgcgccacctagagctctgggtgggatattacataaggtggaatccamrgatgaaaccacaggtatgtgccttacaatatacaatgggagttttcattcatgcagtgcaactttgtctccktaaaagcagctggaaagattatctgtgcatatttaaaactttactccttacccattgatagttaacaatygtatagtagaaamatactacactggggcagggtaatcagtatacctggttcttaggactgcttgtatgacattggacaaatcactgctctcttttcttgcatcttccctcctctgtctggataacctctagggggtcttgttttaataagctgaagaaagtagctttaggaaagttaaaagctgaacaaaattctggtctactgtgaatatgtttatggaatattaactacttagaactgtttaagactaaaaacctataaataacagggaatcttctgactactgtcttttaattgtcttgttaattatttgttgtatttggaaaagtaccagtttcaggagcacctacacagcaggttattctttggaaatactcaggggcactgggaaagccagtgaaaagattagtggtgtccacagtccckgtatttaatttcactgatgggttggaaaggtgccattggttccaacagctgaaaaaacatacactgcaacatttagggaatgatttgacctggctttggtcaggattgcctagttgartattttatgttttgctcttgcaggaacctattcacaacagatacaaagaacttcttgctaaacgagcagagcttcagaaaaaagtagaggaactacagagagagatttctaaccgatcaacctcatcctcagagagagccagctctcctgcacagtgtgtcactcctgtccaaactgttgtataaaggactgtaagatcaggggcatcattgctatacactcttgattacactggcagctctatgagtagaaagtcttcggaatttagamcccatctatgagagaaagttcagtcamtttatttattttaaatctctctaggatgagtttagaactgtagcagtgcaggtggcttaagtgaagtaactccatatgtaattacatgattatgatactaatcttttaagtatccaaagaatattaaaatacttcaatcctggattcasaktggkaacaagtttctattaaaaggcaaatgctgttacaaatttttggcatctggtaatattaaaaccattttagaaatacactctgtgctcactgtgcagaggaacatcagttttcaaaccaacactgaaattctgtggcatcacatatattgggccttgatgtcatgacagatcaaaatcatttgatatccctttctccattctaggtttttctttttttcagtaactgatttaccttgatcacttttcaacttccatattcttcatatagtaaaaggcaaagtrttgaagatactacggtgtggtagtagttgaaaattattgccgtcattatttacatacttaagacatattagcaagttgatccaaaatgggaggccttatagatgtgcttgggggaaaatgaaggggagaaagtagccatacaggagttcaaagaattccatgcccttcagattagcccaattaccagaaacatcatgaaagatattttaaaaactaattatttactacagtgtatttcacttgtcttgtgtgtctgaacacacagaagctaattagcaagtttttaagaagtatttaaaaatcttactaggattgacattttttctgaattctgtataaatagcttatagtgagaagtactgtgctcaaattttacatttttttcctttgcaaattctgtaatttcactcaacgattaagtctaccaaagaacacactgcatgtaaaagatgtattacaatctcaaagccagtaaaagaaatcttgcttcactgttcacctgctacaagtaagagtttggtgctggtagaaacatttgactctgatgtctattttattctacataagagccatatgtaatgtactgtaacaaaggagcttcttgtccccttggtcttttaattaaaagaaattccaactgacttttaaactttgttcttgtccaaagttgccatttcttttttttccccagaaatatttggaaattattggaggaatatgcaccccagatgaaaatgttcagtttgtacccatttttccttaaccaacacccaaatcaaacaattaaaatatacagtgtttttccactcactaattcactatacagagagtctgaaccttagcctccctcttggtcttgcagtgaggaartttctattagtatatccaatttagcaaaattggtaccaaaatgatttctttggtaattgtgtgaaatataagctttttaacagggcatttaagtggctagcaaatcagtaattaaaaattaagctttctactccaagtatttcacaaaygcatctgccattttcctcatttaaaccttggttatcttggcctgataccacataaaagaatgtagaatggctgaagagatcaagaatttaaagcttctagtcttaacatacttgcatccacttcaaattcaaatcaaaagccagggaaatctaagtgcaaccctaccacttctctgctgagaaccttccagtggttcccctcaccttctgcagaagtctccaatatggagtacatgcacttgggcatttaatatataccactggtgtgtgtgggagggagggaggaggaatactagccctttttatatatttacacaagcaaaacttttaaatatttgaattgacagttacatgtttcataacttygtatgtctattggttgtgcaggtgtaattttttccctttttgattagggttacaaaatttagagaccagtatgattaagttgaagctccttagcctccttcgacctagtctctgcatacctcaacttttacgtaccaatgctactctgctgttcacaattgcctcatgtaatctgcagattcctgcctccccactttggttcagtctgtcttgtgcacctggaacaactgttctcccttgtgactaattcctattttctagagtttaggcatcatctcttcctttgggaagttatctgattcacgactgccttctctgacatccccaccttcctctgtgcccccatagcactgtgtataccgctactaccactgcaattcacattatattggaatgaayaattcacatgtctaccacaagtctgtaaacataaccttatttgaaatgaatwgcaataaagctctgttacaacgtaagtggatggatgacacattcctctactgtaaacttgcagataagaaaatggaagcagtattttttcacttctcacctgacagtacaaaaagctggagtagttcagtttgaatcctagctgagaaaaggggtgggatttagcatcattcaatcaccattctcctaattaggactcagagccactacaattcaaatgatggttatacaatttaatgacctgaaattcaaacaaggagataacaggagtttttaatagctgaaatggtggttgacacatatatttatcatgtcaccagagcactgtttctcacttcccttgtgtctatgggctcacaattattaattcaatcaagctacgaacctactcattagaaaactggacacagaagcacaagtttacaatttcaggagagtcacaaataataccccaaaatcttaaggatcctaaattaaagcctgttactgtagtatcttgtatcatgaggaaatctaatattcttgggctctctttctatgtaagcatgagtgtggcaactaagtactagttttttctcttcatcaatacattgatgtcctcctatttagaaatgcattttttgagagcttgtcacaaagcctttattaacaggctgttaaggaaagttgcagtgtttcctttaaaaaggtgctttattgactttaaatttataaaaggttaacatgtcttgatctagttgaaattatgatttatatcaacatgataattatgtgtacagttcatattccactcatactgtacaccagtaaaagcaaatattcaaagggttctctaagtttcaagattaaaaaccataatgccttgactgaatatcatgattacaaaacaggtattaagaactgtgaaggtatatgctcacaacatatcccttctcccattctcactttattccaaaatctcatttatttcactgacaatttgtttatactttcaaaaatccttttataatttttatagatataactcaaaatgactgcttgggtctttaaaaaattaacagattaaaaagcaatacaagtgcacttaacactgatcaaagtctgaaatgccaaaaagcaaaataaaaatcctctgaaatatatatgtatttttaaatatagaaaaactccaccaatagtagaaacaaagtatgtttaatggttgctttggaaaggggaagtgggcacctcatgccagggagatttaaaaatgagacttttcaagcaagcactgcctatagcatagtctcatattttgaaaatttaaacctaattttaattatatataaagaactattttaaaaaatcacacccacaagtaaaaaactggtaatctgtttacaaagtgcagcgtcagtacagcaaactcatctcaacaaaagattatgtgtggtttctcgggctttaaaactcccctggtttccatttaaatgctttaacattgagtcatcctgcatacatgaaaagcctgtgtaatgaagcctgggtcctttaacacctgctattaattaattccaacataagtgagtatgagacctgggaagtaaattgtcatcatctgattgatgaggtacagattatctgaataaaatttctgacctggttatgagtcagtaatcccaacacaaactactgctttgtaatgaattctgtatgctttgcatgtccttcaataactgaagattttttctccttttttctccaggtctcagtttcataaaatctttcttatttgtggtccctgtgattccagaacggctgctgctgtttcyttcttcatcaagagtctttttggtagcttttaattccttcttctgcttctctaacttctgtttctccagctataccaaataaccaaggcaggaaggaaaaggagaatttaatgaaaatattttttttctgacaacaaaaagtacaagagtacctttttttggttaactctcatgctaactgaaactcaaataatacattctaggctttcttttaaagacttcaaaatctactgcactagtcatttaacacttaaatattaatataaataaatatatgcttatatatatataaaacaatacacaaacaagtagacatgagtaaacaaattctggttgtcctaaattaaggcaatattgccaaagtacagaacagggcgagtgagaaacaaggggagttgaaggaaagactcatgaaggaggcaaaaaatcagacacagagaaaagaagaatgggaaggattttcacaaatgggagaagaggagaaagatattctagaaactagtctgaggaggcaaagaagcaatttccagatggatgaacagatgtaattggtaatgtattaatactatgaaaagaattttatttttgttccattatttttagaataattttaaatacgggagctttatttttactttagccaaactgatgctggcatgttggtgttccaatagaataagtctaattagtataagcaacaaattagaccattactccttactcctacaggaataatttgcttgtatttctttttcatacatgaactttgaaaaaacagccaaagttttagagttgaaaaggctagtttcatcccagctctgccatttcccagtaagctggtacttgggcaagttatttaatttcactgaggatatatgcatacttcccagaaaatgtggcttagcatctacctcatctataatatgagaatatacccacctcagaagccttttgtgaaaattaaatgagaagatatactcagagcacttggcactgtgtgtctatcatatggctaccaatcaacagtcaacaaaactgttctgctctctgaacttctcagctttctccattttagtcagtggaatcaccatcctaactccctctccttctacatgatacccagcagcaagtaaccccaatattttttttacttccaaaacatacctcaaatctgtttacctctgcccaaacccaactactgtcttgctgaccacctctgatacatctatagctgatctctcagcctctctgccttgatcccattaccctacccctagtcactacagtaatctcttaaatatatgaatcatgtttctctctggttgaaaacccttgagtgtgatgtcaccactgcatctggtagtactacattgttggctgatataaaatgattagcaacataaatatatttcacatatttaatgtatgacttattcctttggaaacagaatttcgcaggtgcttttaaaaaaacttacttggataaactccratttaaattcatcaaagaagttaaagcttattcataaagaatattaaatatattcagtatttgaaagatgtttcttagatgaatatgctaagtgactaaaagtgtcttctttcttaatccacttaccmattctcaatgaacaaatgtcttcagtaaagaagtatctcctgtagatatttatctatgatacacttagtgtcatcatttaatatttgaattaaagtgttttttttttcttaatcattagaaacttgagtgaaggaaaactgagttacctgggcttggtattttcgaactttagttatttggttggcttttgcttccatccttcccactaatgcctccaattcacactccaacttgtctttcagttcaacggttggcgactcctggataagttttgcaagctgctggtgatcactatatacaaagcagaagtagaacatggttaagttttctgtgtttcatggttaggtctattatacctcattatgggttactgctccatgtgtttaaaaaatgactccattttttgaacagagcaataaattttttttttttttttgagacggagtcttgctctgtcgcccaggctggagtgcagtgacatgatctcggctcacagcaagctctgcctcccgggttcacgccattctcctgcctcagcctcccgagtagctgggactacaggcgcctgccaccatgcctggccaattttttgtatttttagtacagacaggttttcaccctgttagccaggatgtgatatgcccacttcagcctcccaaagtgctgggattacaggtgtgagccaccatgcctagcctagatcaagaaatttttaattaaaaatatgaatttaaaagttcaagaaaggcactagagggaaatgcaagagttcttaatttcaaggttaattctttatattcttattttccccaaaagagtattgtatatgtaaagtctacagatgaatcttgctcttcaaacactcatgtcttatcagttaagtttagctaaaatgaatgtgatgtcaggtgccagatgatgatgtagtaaacaacagaccacatatacaacagtggtcccgtaagactttagtatcatatttttactctacctagatgtttatatacacaaatacttaccattgtgttacaactgcatatagtatttagtagtagagtaacatgctgtataggtttgtagcctaggagcaataagctataagcttagcacactcttatgttagcacaaggaaaagaaaatcgcctaatgatgtmtttctcagagcacatctttgtcattcagtgatgcatgactgtatatcataagttctcaaagaaataaaacttaaatataaaccttggtcttcaaaacatttaacagtatttaaaaagagagagattttacccttattagttgtatttgttaaagtcccagtaacttggttggtataaggattgtgctcaaccatacttgctcaacaaaggaaagtaagatttaataaagtcaacaagtttttaaaaaatgaggttttagagctaaactgaatttaaaaaaaaaaacaaaaactcacaagctcatttgcccaaattcatcctgtaaagtctgtaagacttctgacaactcctcattaataccgttggaggagggaggtgttactgacarcttcttacttttaccacctcgtgaagatacttgctttgccaaaggaatactgttgaygactcgatcattgcacaaagctttactgtgttgcttcattagatgcaagacaagctgaacattggctaccacggcatggctagggcttgtggactaaaggaagaaaaatgatgaaagaagtaattgaagttatattctctacaccactttctattccctaagcctaggtaaaaagaactctccaccccctaaagtagagtatataaatcctaaaattattctcatcatgatgttcttctatttgaaatcctttgatataaatccactaactatgtttcagaatggaaaataaggccctacatacacatcattgagctgcaacctacatttcctagcctcatgtcctatcatcctccccttctctccattttgtgaacaaaccatatttgcagatgacatttttttggtgtattagcaacatttatatcattctttaaaacccagttcaaatatattatttttaaaggcttccttaaaactgccaggtaatcaatcagtccattatcagatcacctataacactttttacatctctctcatagcatttatcatattttaattgcttttacatatctatttcacctattaaacagtgtacatccaggtggtagacactattgttcatttctgtatcctggaataataggaagcactaaattacatgtctatcaygtgtgtaagaaaaacctgatagacttctcaaagatattttgcttttgttttaaacactaaaccaacaatctcaatgtactattccactttataaatagatggctgggcttacttggctccataaatattattagaaagcatatttaaaatgcaggttcctaggcagcacaccaaactcactgcagagttagggtttggaaatttgtgttttcaagtcctccagttgattttgattagccagatttggaaccaccatgctaagctaaacatatgctttccttctaatcttagtttctattgttagctagcaaagtgaatgc

SEQ ID NO: 94955 - DNA, 31589 bp, Homo sapiens
gaatgcttgttttgttagggaagggcttcctccaacttcgtgtgaaattgtgatgttgaagtgaataaatgtctattgtgtaactctcatgcttcttggtctattttcatggtgtagtagccacatttacagtaatttttttaaagaagaaatggttttatctattcattcaaaaatatcttttgaatgtcttctctgagctgacactatgccagatgctagggatttggctgtgatcaagataaacacaatctctgcttttatgtaacttatactggtggaagagacgaacaataaataaatatcagactctccaattatcttacagaaatgctaagaaggaaaaaaaaacatggtgatgtgatagagtagttggctgggtttgtttagatatgggtgcctaatttgaaaaagtccatggaagtgcgacctttgagttgagatctaaaggaagaggatgtaaccaccattcattctgacaggggacagtccgtagtatgtgcacaagggcttgacatggtcaaagatgaggtttggtctgctggctggagtctagtaaactggaggcgatgccagaatctgattcacatttcagaaagtccattctgtctgcatgtggacagtgagtggggatagggacggtaaagggaatggagggggagctttggaagatttgagagagacaataatggtttggaccagggagcttgtgatggagagaaaaggctctatctgggagtggaaccaacagaacttgctgatgtggagggaggagaggggaatctaggaggactcctaggttttggcttgagggtgtgggtggatggtggtgactcttagtgaattggggaataggagcaaaacggatcctgaagtggcaaaagttcaagccaccatgggatgtcattgcacaccaccaaaaccaaaaatatggaaaaggaggacaatacccagggtaggagaggatggctttggaagactgcctggcattgagtgtcaagactggatgtacatctgtcttgtgatctcttcatttccctrtcccctcaaacctttcactcttgaacctccagagggcgatccaatgtctgaggaggacaaatggcctgcaattcccttcccggagcagtgccaggacagagtgtgaccctggccccctgcacccatgtggcatgcagatctgggccttgattgccttaagtcatcctggccccctccaggacttttttgaccttcatgtccacccacgcaaggacagccgcccttcctcagcccggtggtcttggatgcggctgagtgcctgcagtccctgccactgtcacttggggccactattaaagcatgagtctgcagcttgcaccttcctacccactatctgggccagcctattctgttaccagcacagttgattgttgagaattcaaagtcaacgcaaggattcgaggctctctggggagagaacttccttcatccccattcccaacacacggctctcaatacttcccttggatagcagtgtatttaaagatgctatgtacaaaaccaaatttactcctttctcattttgaaattttgcaagtattaagataagtgggccgggagcagtggctcacgcctgtaaccccagtactttgggaggctgaggtggatggatcacgaggccaagagatcaagaccatcttggtgaaactccatctctactaaaaatacaaaagttagctgggcatggtggtgtgcgcctatagtcccagctacttgggaggcttaggcaggagaattgcttgaacccgggagaaggaggttgcagtgagccgaaattgcgccactgcactccaccctggtgacagagcaagactccgtctcaaaaaaaaaaaaaaaaaaaaaagtcacagaaaagtttaaaaaatatgagaaaagacagaggaaagaacactttgaacaagaaaaccaaaaggtaggtcaaaactatcaaaggaaatctctgtgtatgtgtttgtatttttatatatttatagtcttctaaatgtaacaaggctgagcagcttaaaagaacctttttaataatgagaatattctatataactgaatgtggaatatgttagtaataaaaggaatcttttatgttaagatcatattgcaacctatacattataatatgatacataaatcaatccaaaggaaaactaaaaaggttaaatacaaatcacagatcatttttaaaaattaaactttaaaaattttgagataattgttaattcacatgcagttgtaagaaataatagaaaaagatcatgagtattctttccctggttttcaccaatgataacatcttgcagaactatagtacaatagcacaaccaggatacagaacattcccatcgccacattcttcacgttgtctttttgtagctacacccacttccctcccatcttcacttctggcagccactaatctcttctccatttctatcatctggtcatttcaagaaacgtataaatgaaatcgtattgtatgaaactttttggattggcttttttcagtcagcataatgcccttgagttctattggcattgttgcatgtatcaatagttcagttctttaaattgctgagtagtattccattgggtggctttaagacacaatggaatactactttatttgttacaaataaagcagctatgaactttcagaaacaggttttttgtttgtttgtttgtttgtttttgccaggggcgagggtagagggtgggatatgaagcataagacttcacttctctggaataaatgcccagcaatacaactgctgagttgcgtgataattgcatgattagtttgttttcaactaactcatttattttagataagaaacttgattttgacaataaatattaaatatcacgcattaatgaaatatctggtcagccatggtggctcatgcctataatcccagcactttgggaggccgaggtgggcggatcacctgaagtcaggagttcaggaccagcctggcaaacatggtgaaactccatctctacaaaaaaatacaaaaattagccgggcatggtaatgccagctactcaggaggctgaggcaggagaatcgcttgaacctgggagacggaggttccagtgagttgagatcacgccactacactccagcctgggtgacagagcaagactctgtctcaaaataaataaataaataaataaataaataaataagaaatatcctatttacttatttgtttaatgatcaagatttaaatacgtcacagataccctctctaacctagctggaaaagatgtggataataaattcttatatagccaatcaactttcattaagtgcaattaataattgagaagtatctctacacattcatatcagaaggaaattacccacagggtagtcccatgatactcaccatttctttggtgtcactgtcacatgaccccgttttatgaaacaaacccacaggaggggaggctcagacacaacatatttacatggagaagctaaaatgttatttaaagtattaacaaaggaaactaaattctgcatagccaatcttcattaagagcagcttgcaactcctaaatatttgcagtagtttctttcagaaaacctacagctggacttctaatcccagcttacttatagttgagtattacaagggaccacctaggaaagcatgatgtcataacaaattttgacttgtagctcagtgcaattttatcatcagtactaaaacaattcagagtgtatttcatgttgatgataggtcaacaatagcatgccagacacaaaaagcagtatattatatcatttgtttttgtcagtcaagacaaaaattgaataccgaatcaatcaagtaacattattgtatatttcaaaaatgacagccatgaaatcagttattgcataaatacaggtaggtttttttttcttttaagagaattaaagccagtgtagataaatctttcatctgagaatagtactaataccttttcttctccctatattttcagaacttttggctatgattatttcttctattgttttctgttctatcaccatgtttattggtcggcttttgtctctttcgttttagttatctgataaaaatgcgaatggcttggtggttcgtgtcttggttgttagtaagctgggtccagcctgtagttctggaacacgatttagtgagggagacagggatgtgaattaggaagtaggcaatcatctcatgcagtaagacagctatggcattggatcgtatgcttgctactgcatcttctggaaaaacagtattattgcagtaaagcaacattattaattggaaagaactgcatgggaaaggaggatctgcccacagattcttcattcatatagctgtgagaattaagaatttgtcttaataataaatttattaaatttatctttaacatcttaaattatcttaatttatcttaagatctgcccacagcttcttcattcatatagctgtaggaatttatcataacacagcactgaaaactttggtgagatgattcagaagagtgagaatttccaattgatattgtgcatgaattgatctttccatataaacaaactccattcagtagaactatggcatacgactcacattttaaggtgtttaaaaaatgcagacaaatgccagacttccatttttctgtttttgcatgtagtcactgtggttaatgttttagcctacaagaaactgaagaaacagctcataaagaatttcttcccctactggagcctctaaattcctgtcctgtcagccttccccagaggaaggataagcagggtaaaggaggtgctatgatcctgccctgcctccatgcctggctgccacccagagagggaaaggagtagagccatgattcacttttcagagagctgccaagctgttttctagagtggctgtaccatcctacattcccaacagcaatgtgtgagtaatccagttacacagcaggttgtttagcatgttttttaaaaaatagaatggtgcatgaaataggtggagtgaaagctttttatcagaaagagaatctgtggtacaaatggagggaatgccatcaagattagcaagtagaaacagaatttaagttcataattttaggagaaaccattcagatcaggttgacctggaagaaaggaaacttgaaagactttgtggagacagacagaacaatgcaaacataaagaagtagacacattgacattcttttaacaagacagtaaccaaggacaggtggttatgtcaccaaaccctgggtaaaagctgccttgggcatggctcttgtaatagggcctccatcttgtaggaatgaagcaatagtaataatagcaaaaattattcagcacgtatcaccattgtgcagatagaggaaactgaggcacagagagggcacaaaacttgctcatagtcacatagctaggaagtggctcaatcccaggcattctggccccagagtccatgtccatgttaattattattagataccaccatgacccttataacttacagtgagaaaaaagctctccataactagatgcaggaccatacacaatttagttctctctaatttgaaggacagtctggagtgggatctgtcttacagtaaaagaataatgtgctaaagagaaagactatgacatgaatatgagagtcgacttaggctttgtaggctagagaatctcctgattctattgctgtggttcctctgctgagcttggttcagtagaaattgtgtcaatgctcctcgcctgtgtcatctggcccatacaactccttgaaagaaaagctcaggaatcagaattgccaggctagaataaaatagacactctttctcctggtgtctgactgaagatgcagcatccttgaaccagcagctgctgggactcctgtctgtcatctcaaagggtacggcccacccagaaagtgaaatcaaaacaggaagtcaccaggggtgactggaggagcacaggccttggaaaggaaagcagctgagatccagaggagtggaaggctcccccttgactaaagctgtaagtagttaccttgggctgcaaacattattttttctttgcttccttgctcactgaaaataaacaagtggcattattggtggattgctgtgacattctcatattgatcaataagacataaacttttctatttttaatctatcttttttttttttaagtctgcgatttccatgatattttcttaccataccctttcaaacgcatgtctctccaactgcctacataaatcaacgagtgacttggatccagttcctgtggatttatttctgtggtgacagtcatcccgactttaccaaaagcttttaattcagtcaagagaatttttaattttttaaaaggaccggctggtgaatgcaagaaacttttggcagggttaatagactggcatagtgggtggacctatgagattaatattgttaatattttattttaaggaagcaggagctgtcggaaagtaggggaggatgctactaactcaaagggacttctgcaacttcaaccctaagtttctgagacaggaaaacagacatgttggttgaaccatgtgaaattacttttgctaggtcaaaaacagtgatgattggcaatttcatgttgcacaagcatttccatctagcagtgctttcagagaatccaaggctgtgatatatcattaccttctcagatttgctctggtttcagctgtgttcattagctatctgaagcattgaacacccatccaactctaaagctggaagattacctcatctgaatgagacctggccccaaaagatggttaaagttcaagctggttcttttcaaggcaaccttgccttttacagggcctgactcagtctcactaaagccatatgtaatactccaatggtgtagagacagaaacgtttttctttgccattaagtactttttttggatacagtattgtacttttttggtatacagtattaagaggaacagttttaacactggagcctggcttttctgcctattgttgcttcttattcttattttgacgtgtcacccttgctgcctgtgagaatgtcattgataataatacatgatatttcccattctttgtttctcagttcacttgtcattttgcattcaggagaagggacagaacaggaagtccagtagccagtgtcagagcctggagcagctcctctccttcctggggttgagttccttggttttcttgtttcacctttgctaccccactgcagtttttctaccacgctgggtttagcacgaatcaggagttgatgcccaggtaccctgtcaaccccatttcattccagcagttcttcagcacggtcatccaaatagactagaatttgaattgaacaacagtagttctgtgggcctaacaatgaaataatattaagcagtcaggatattatattactaaatagtcactcacttttgttaattattgtcatctgcgttgtagtcttacagaggactttcacatatctttaggagatagagcaggtatgattacctaaacttttagatgagaaatagaggtccaaagaagtggtgcaaagcagaaactacacccctatgcttactcttgagaaagtgggaaaaaaatgaggtttttaaaattaaagacctaaaacctagtccaattgaacattattctaacagatgatcagattcacaattagaaacaaatatttgagctattactgtttttcgtttatttgcttgttttttatttttgagacagagtctcactctgtcacgcaggctggagtgcaatggtgctatctcggctcactgcaacctcctcctcctgggttcaagcaattctcccgcctcagcctcctgagtagctgggattacaggcgtctgccaccatgcccagctagtttttgtatttttagtagagactggctttcactatgtcggccaggctgggctcgaactcctgacctcaaataattcgcccgcctcggcctcccaaagtgcagggattacaaccatgagtcactgcgcccaccccaatactgttttttttttttttatggtgactctttgaccaaataatttttaattgattttaactttttacccctttagctaagttcattaatcccaaaatggcaaattaggaagtaggctcttttagcaacgaattacaattaatcaatgttccctgtggcaaaataaccttactttattttataattcagttaaactaaaaattttaatctttacctgatcaatcatctttatgaaaagtcaactattgaaactgtatgtcctgaatttggttttttacttctgaagatttaaaacaatatcaatgacctctacagcaaatattttcttcacatctcagggattttcctatatttaaattgctccttcatttactaacttctaattcttttttgcaattacctttgttactcaaattctcagtttcaatgagacaatttttagatgcttcaaataaaaaaacaaaggagggaatttagtcatcttgattttatatcagaagtgattttccctttccctgttagccaaacaaaaaatccaaaactctgatcaacatcatttctatcttttacagccaaggacagagaaaaacatccagatttgggaacacaataacagatatgattgtccccacttctactgccaaaattataaaactgttaactcctcctcatcagcttacctgactacttaaaagcaaaagagttaattaagtattactaattggtgatactagatcaatgaaggtaggtcatggcccaaattgtacttatggagatggaagagcttaattgtttttattaggcatcaactgcatcagaaatttcattagcacttagcaaatttgcctatggtcttcttaaggtgatcattttgaattgggttctttaaaagacatgaatgactggctgcagtgactgacacctataatctcagcactttcagaagccaaggtgggtggattgcttgagctcgggagtttgaaacaagcctgggcaacatrgtgaaacttcctctctacaaaaaataacaaaaattagcctgacatgttggtgcgtacctggtgttccagctactagcgaggctgaggtggaaggatcacttgagcctgggaggtggaggctgaagtgagccatgatcataccactgcactccagcctgagcaatagagcaagactctgtctcaaaacaaaaaaacaaaaaacaaaaaaaccccaaaagacacgagtgttcagacactcagttgcagacattaaaagagagcacagacacatgtgctgttttaggtataaaggaaagactctggaatcaggaatgagaagcgaacatcctgctctgtcgctctagctctctatgcctcagattcctatcctgtaataagtgggcatttgggttacatgatttctaaactctaacagcactcataatctattatataccaatcacctatgctaatttactaattatacactagatagtatggttatatactaacagtctattatacaatctgctaaaaattcataaaaatatctatccctttacattttccacaaaagggcttgaccatttttcctgaattatttttagttttctgctctatagagataagaaaagttattcctttaatagaaacttctattcaaagcagaaaatatgagcagatcttatttatagcycctaggccccattcttaacaaaacatttatctcagtawgaaggaaagcacagaataaactttgtttaatcgtacctactcttctatgctgtctaaaagcatttccgtgacttttaccaaagggctggataaaaataaaacaaatcctttatttggcaggattgggcctggggaagggagaatatgaatgtcctaagaaggcatctgagatcacatcctgtatttgttgttattattgtttttttttttttttttttttttgagacggagtttcgctctgtcgcccagcctggagcgcaatggtgtgatctcagctcactgcagcctctgcctcctgggttccagcgattctcctgcctcagcctcccgagtagctgggattacaggcgcccaccaccacgaccagctactttttgtgtttttggtagagatggggggttccactatgttggccaggctggtcttgaactcctgacctcaggtgatctgcctgcctcggcctcccaaagtgctaggattacaggcatgagccactgcacctggcctgttagcattgtttttaaactcattgttgttatttgctgctaacaaaaatgtaagttacatcttctccttattacaacacagatgatctttatcaccaatcctggactcttccccttccctggcatcttcctccaaagcagggggtggggagggaggaaaaagaaggaggagaaggagtaggaggagaaggagaagtagggggaggatggggagggaagggtgaaagagagaaagaaggaaagaagcggagtatcctgaggcctggggcccctgarctgagattcctcctctggcctaggtgcctcggggtattgttgctgtaggcactaactatacagcagtgaacaaaccagacacaaaatcctgcttttctggagcacatgttttcagtccttaatagcaataagtaagtcagagtgtagatttgggtaaattttgttatcaatattgtcctgtgttacattttcttagtagtaagtatttaatattttcccccccrtctaaaaataaacacaatgtaagtgactcaacagaaccaaaaaaattgttgtcaatttttaaatttaataaatgagatatttgttgggatgtgatttttttacacgagagttagttatgagtttctattaacaaaagctggaattgttctatatttgaattcgggtgtcttttggaaattcaatattaaatcttagtactaatagtacatgctgttcaatccctgtaatactttctgattgtcttaaatggactgcaacttttctttctttaaaagtggtcagatatattgcgttcttaagattataaagtargccaagtgcagtggctcacgcctgtaatcccagcactttgagaggctgaggtggatggatcacaagatcaggagtttgagaccagcctggccaatattgygaaaccccatctctactaaaaatacaaaaattagctggacgtggtggcgygcacctgtagtcctagctgtttcagagrctgaagaaggacaatcgcttgaacctgggaggtggaagttgtagtgagctgagcttgcgccactgcattccagcctgggtgacagagcaaactccgcctcaaaaaaaaaaaaaaaaaaaaaagaagaagaagaagaagaagaagaagaagaagaagaagaaaaawgatgataaagtaaaaggccagtaactggcagccacatgttatgcaaacattctcccctctgtaaatactacatgaatgttatttttgctttcagaaatcactaaaccttggccatggtcacttcctcttttccaatctctgtggcagtttttgccctaataamcctgcaggttggtactcaggacagttttatagctgcagygtatgaacatgctgtcattttgccaaataaaacagaaacaccagtttctcaggaggatgccttgaatctcatgaacgagaatatagacattctggagacagcgatcaagcaggcagctgagcaggtattctcttatttctgttaatcataatgtacacgaggggcatgggagctggtggaagacgasagagctgaattgtctgtgttgtacatggaaaaatcatttttattttgcttgttttgaacagggtgctcgaatcattgtgactccagaagatgcactttatggatggaaatttaccagggaaactgttttcccttatctggaggatatcccagaccctcaggtgaactggattccgtgtcaagacccccacaggtattttaactatcttrgtcttttgtgcaaaagtaactctctaaaatgcgcacgttcaccaaagcaaaatgattgctcttgaattaccatatatgtggtatatgttatggttatatttatctcaacatttgtcagattttaaaaaattgtacttagatactatttaacaatcttttgtgattgaaaatctttattaaattttgagaaaatgtgtaaatagggtattcctgcaagaaaaactaagggaagagatctcatagatacaagtagtaacttaatttctgaagtagacagtggaytgtgktaggaatacattccaaagcctctgctgaagggacaccctttcaatgttatagagtctctccattccagagttgcttcttaggcagaaagacttcaccatgtattttcaagtgaatcataagaccttatgctttgaaactgcattttcctaggctcacaaatctaattttcctgggaaaaggttatctagaaaccttctaatatatattaaaaatctgggtcctactgtcatcctggaggtgtcaacgtggcagttgcatggacaagtctggcatgaaaagacaaaattatatctggagatagaaaatcaaatgtcagcatatagatggtgttaaacaccatgatgagttcacctgtggagtgagttagagaagagtttaggtataaggcttgagcactaggaaattctagtgtttagactcggaagaaaacgaggaatcagcagaagagtcgaagaagagcaaccaataaataggaaaatgagagggtgggtccaatagagaagtgaggtgtttccagaaggaggtgtaattaactgtgccaactgctgttgaaaagttaagatgagatcaggtaaaatgtgggggtcactgctggcattagtaagagtttgggtgatagagatacaagttggagtgctctgaaagggaatgggagaggaggaactggcaacagcaagagggactgatcttttgaggagttttgctttaagagagagatgaggattaaagcaatatttggaagggcatgtttggaaaggtcaaaagaggttttaattttattttttaaagatgggaggtactagaggatatttcattgctgatgggatgtttcagtagagaggagacccttgatgaggcaggagaccgaataatgaatttctggagcaatagataccgtgtgggaagcattcatcaagtgtataatcatctgtggcttttaaagtatgatatttttaggcatagtttttgtattaacttaagttccacttaagtggttacagttgctatcrtttccatataaagtgactaaaatatttttttaaaattgaaatttcttaattataatttggtttagatttggtcacacaccagtacaagcaagactcagctgcctggccaaggacaactctatctatgtcttggcaaatttgggggacaaaaagccatgtaattcccgtgactccacrtgtcctcctaatggctactttcaatacaataccaatgtggtgtataatacagaaggaaaactcgtggcacgttaccataaggtaagagagagtgacggacgtgtaaaatggagcgtgttgtgagtggtcaatgctgggtttaggagtttgaatttcattccctataygatacaatattactagagggtttttttgttttgttttgttttttgttttttgaaagtgggcaataaagaaaatgacacttttggctgggcgtggaggcttatgcctgtaagcccagcactttgggaggctgaggcaggtggatcacttgaggccaggaatttgagaccagtctggccaacattgtgaaacyccgtctctactaaaaaatacaaaaattagcggggcgtgatggcacatgcctgtagtcccagctatgtgggagctgaagcaggagacttgcttgaacccaggaggtggaggctgcagtgagccgagattgtgtcactgcactccagcctgggtgacagagggagactctcaaaaaaaaaaaaagaaaaaaaagaaaaagaaaaaagaaaatgacacgttgtaaaaaactactcagaaaaacatgtaggcagagaactgttaaaaaaaaaaaaaagtagcatgatggtccaggattgagataaactttttgcacatataaaacaaataattttaacataaaaaaagatactaaggtgactataatctgggcactgtttcaataattttatatttttttagagacagggtctcactgttgcccaggctggagtgcagtggagccatcatggctcactgttaacctcaaactcctgggctctagtgatcctcctgcctcagcctcccaagtagctgagactgtaggcatgtgccaccatgctaatttttaaatatttttttggaaacagagtctcactacattgcccaggctgtctttgaactcttcacctcaagcagtcctcccaccttggcctcccaaaatgctgagattagaggcatgagccactgagcacagccataatctaaatactatttaatattgaaatggtakaaagatgtttcaaaattgtatgaatcagctttgcataagttaatttgctatcaaaccacaaaataccttattttctacaccagctaatttaattaccatcttatagatttaagatcaaaccataaaatgtttactttaaattctgaattgaaaaaaggaatcaaataacctttaagtcataattttatactaaactaggtagagaaagaagcctggccttttaaatggatatgtgtgatgtacaggcagtatgaatgtcccttctccacacccagatattttgtaagcatcttaaactgtagcctcagaatctttggagtggagaaattatctcctggcagtctcagttaaaatataaatattaattaagaggagggatgttaaaccaatggttttcaaatgatttcgatcatggacccctattggaaaaaatcgttaacataagtcctcaatatatgtatttttgtgtgtgtatttataaagtgcaacaatttcaaaatgctttcttcataattttgtggattttgacagcttcttttcatatatatcactgcayttcactttcttcttaaaatgtgtctcatagtaaaaatagaaaggtcagtgcttccattttcttgcttgggagattgtttgcattatttgtattatctttcaatgcagtttatttgcagtaatcatttgaagctattctgccattctgtaaatgtgcaggatggcacagtgcactgaatgtggacaaactagcaaggaacctgcagtcaccctgtctaagttgaaaggctctcactcttccctgagggtacctcagggaccgtttgtaacccatgacctctgacatatgtgaacctaatgagaatacctttgtcgatcaattcctttttttttttttttttttttttttttaggcagagtctggctctgtcatcccggctggagtgcaatggcacgatctcagctcactgcaacctctgactcccaggttcaacccattctcctgcctcagcctcctgagtagctgggattacaggtgcataccaccacacccggctaatttttggattttttagtagagatggggtttctccatgttggccaggctggtcttgagctcctggcctcaagttatctgcctgccttggcctcccaaagtgcttggattacaggcatgagccaccttgcctggcctgtcaattcttaaaatagtagtaaagcccaatttcttttctattttttagatattttttctacactgcagaccattttattaactgttgattccatttattatattagactaagtttttttttagtttacctagaaggaatcgggraattaaatacatttctatggtaattttgaaaggtgggcaagagtcactgagattactttggatgggacactaaagagagagatgacatctctcacctgacttacaggtatttattatgcatctattaatattacgtttctaggcaccaaggattcaaagaagaataatgcatgttttttaacttttaagaagcttatagggccaggtgctgtggttcattcctgtaatcccagcactttgggaggcccaggtgggtggatcatgaggtcaggagattgagatcatcctggctgacacggtgaaaccccgactctactaaaaatacgaaaaaattagccgggcatagtggcacgtgcctgtaatcccagctactcgcttgaactcaggaggtggagattgcagtgagccgaaatcatgccmctgcactccagcctgggtgatagagcgaggctccgtctcagaaaaataaaattaaattaaatttaaaaaaagcttacggactttggggtttatgggggggtatttggctcttaactgagagagagggaaagagagagaagggagagagaggagatgagagatgctatggacgtatgttacatattcctccacattttccttagaaatttacttccaattgccagatttatccgcttcctaggagattccctgcagttgaccatagccaaatctgttaccaacttagagggtttttatgagtcatttcttcaacaaataaggttttactggttttctcctatccatttgttgtagtaccacctgtactctgagcctcagtttaatgtccctgaaaagccrgagttggtgactttcaacaccgcatttggaagktttggcattttcacgtgctttgatatattcttctatkatcctggtgttaccctggtgaaagatttccatgtggacaccatactgtttcccacagcttggatgaacrttttgccccttttgacagctattgaattccattcagcttgggcaatgggaatgggagttaatcttcttgtggccaacacacatcatgtcagcctaaatatgacaggtaattcatgaccaggttaggtttcatcttatatttttaagtgcagagaaatgaatgcctcagttatgacttgtattaattttttgcttattggaaattcttactgtgtttgtmatagtttcacaatagaaaaaaaaagctagcacttgattataagctatggttatactaagayctttatgtgtattattcatttaattattacaataattatatgagatagatagtgtcatcccaattttgcagatgagaaaattgacatacagagagtgcaagtaatttgccaaatgctacccagctactactttcctcagtggccatggaagcctctatatcttgccctttgtctccacctatggctgcatggcatatcctcgtgacatggctgctgtcttcctctagagcaattaatgagaggggacaagagagaaaaggaaagaagccacattgctatttatgactagttacccaccatcacttctgccatgttctattcattggaagtgagtcactaagtccagcccctcttcaaggggaaaggaattagatcctcccaccagaaagaagaattttaaggaatttttggatatatttgaaaaccaccacaatgaggaataggggagaatttttattccctttccccacctttcaggaactcctgactacaaagatttttgtagttggtttaattttccataatgctaataaataatgctattatatttaaggtttaattgaaatgagaccaaggaatgtttattttaatctcttccattagagaatagaagtagttaggtgttcagtgcaattagaagcatgtatcctctctcatcgtgactaatatggtggcgtgatcacatgcccaattctgatggggaaattggcagttttggtttttttgtgtgtggtgttgtttttagaagacttgtctttcattcacaggaagtggyatttatgcaccaaatggtcccaaagtgtatcattatgacatgaagacagagttgggaaaacttctcctttcagaggtggattcacatcccctatcctcgcttgcctacccaacagctgttaattggaatgcctacgccaccaccatcaaaccatttccagtacagaaaaacactttcaggggatttatttccagggatgggttcaacttcacagarctttttgaaaatgcaggaaaccttacagtctgtcaaaaggagctttgctgtcatttaagctacagaatgttacaaaaagaagagaatgaagtatacgttctaggagcttttacaggattacatggccraaggagaagagagtactggcaggtaatttcagttcaaatgaaaggkcattcaagtgaaaggtaaattccaggttaactttttatatttgttccagaaaaccaggtgcttttccttggcttgactccatgcattgatggcaacacacacacacacaacacacacacacacacgtgcatttatgcacgtacatacactgggataaaatatttacaatgggaattaagtataatcttattgcttgctttaagcatatttaaaaaattattaacctaaccatgatgagtttcgatttgactaataaaccagcctactgtggagaacatcaagaagacttcyttaagtgggtttgccaacatatctaaattataaacagtcttattttcacttgcaaaactaacagtaaatagagatactacttttattttagtttctcttctaatcagatgtcccgggttttgtatagctttctttttcttttcttttctttttcttttttttttttttgagacaatttcactctgtcaccctggctagagtgcagtagcatgatctcggctcactacaacctctgcctcccaggttcaagcgattctcatgcctcagcctcctgagtagctgggactacaggcatgtgccaccacacctggaaaaatatatatatatatatacacatatacaaaatatttttagtagagacagggtttcaccatgttggccaggctggtctccaactcctcacctctgctgatccgactgcctcggcctcccaaattgctgggataacatgtgtgaaccaccacacctggccttgtattgctttcaaatgacaaattttaaagatgaaactttttatagaatgttggctctgaatttgtattttcctattatactccatgtcccactgccttcttctaaagaaaaggattgggaagagaggtgagattaaagggtggaaaaaattttaatatcctttcagcttcagtactcttcagtactattgttgcccaaagatctccacttcattgagctcgatgccatcatctgacataccaaactaatggtttaactctaattctaaactgacttctttctcttaatccgcttgttatttaggaagtgggttgattctcaagtcactggccatttttaataaagcagttaattataagacacatgatccaaatcccttttcagagaaagataatgtttgcttcgctgtagttaaaaactaagkcaacatttctggtatgagtaacttcaatgtaaggcattgcgttttatctgcgtttgttccacataggtctgcacamtgctgaagtgcaaaactactaatttgacaacttgtggacggccagtagaaactgcttctacaagatttgaaatgttctccctcagtggcacatttggaacagagtatgtttttcctgaagtgctacttaccgaaattcatctgtcacctggaaaatttgaggtaagaggacttttataagagtattttcattttatatgttctctgaagtcaagtaaaacaagctatagccactctgccagttaacttctgctgtgtaacaaatttcctcaaaaccatttctttagccctggttctgtgggttggcaatttgaacttggggtaggtaggctgtttttctggtctgagataggctcagttgacgttggctgggctcattgtgtctgccattggctagtgggttgattaggactgaccagtttgtgattgccttgtcctggacagctgggattattaaggccatctctccccgtggtctctcatctttcagcaaacctgagcttgttcacatgttagctgaatgagtccaggagcatcaagagaaaaacaaatctttgcaagttctttgcaaatctctgcttgcaccgtgtttgcaaatgttgcatcaacacaggaagttacatgagcagtggtgattcaaatggtagagaaatgaagaactcagacctctcaatgggaagagctataaaatcacacggcaaaaggacatgggtcaaggaggggaaaatattgtgatcattttttcaatttataacaactaattataaaatgatgatacttcattggaagaacataataaagaacatacctagaactgtgagtctgagataccattcattgaagaatgtttgtttatagatttttaatttccttttgtcactagtgaagacaaacagaaaatcagatgtttatttcacatttttttttaaacagagtcttgctctgtcacccaggttagagtgcagtrgcatgatcatagctcactgaagcctcaaactcctgggctcaagcaatcctcctgcctcagcctcctgagtagctaggatttaaaggcatgtgccactgcacccagcatttgttcataaattacagtggctgtagctaattaattcacaaattaagctggcttcaaattagaattatgactctgcaggcttatatctgctaatatacaacacttgcacacatgcacatacacgcatacatacacatattccagtggtttgaatattaatgtcttctctgaattgtggcaaacagtggcagggtttcagtaactaggrtgaaatcattgcatattctataaaatagggtccaagttaattcaatcaaggcatcaagtaaggaagtctttaaaattgcagattgcttatggtcatgtatctgtatctgctgtgttatcagagtggaatatatcatacttataaaaatgcttaattctatgaaaccaacaatttaacatacagtgtaaccttaaggccataaaatccaaagatcaggaatsctttgctgccatagaacctgtttaggyagaatctcatgagcaaattgaggctggaataaaagctgaagtgccaactacagaaaatcatgattaaatctacagcaaggagtctggggctaaaatccagtagctaaaaggtggctggactgacataaatatctatctgagatcacttcaaggaagtgagagagagaaatcagggtcaccaaggtaaacttaggaggacatagggtctagccatattgatgcattatattctgtaagcctgaagrtttaaactgagcacacaatctaattttctcgtactactttgccactttttccatgtcttgtactcatagaaatctatctctttgaggaattgtcccatagtaggactgaacatttacctgatgaaactacttcatccatgggagaaggacaaaaaaatgctagagttttccaaactaggttaaaggtccaaagccagaaataccatttcactcttactctgaaccacataagtgtttgaaggtggatggtgatagtgcatgaagagttggagaacgtaaataatttattccattactacttcctttctttgttttaaaaatttcatcccaaatgtcttcaggcagttaagaagagttagagaatgatacaagagaatacatgtttaaatgcttaactccatagtatttgtacatctcaactcttaaacatttttttaaattatttttaattattattattatttgagatggcgtctcgctgtgttgcccagactggagtgcagtggtgcaatctcagctcactgcawactctgcctcttgggttcaagcgattctcctgcctcagcctcataagtagctgggactacaggtgcatgccaccacgcccagctactttttgtatttttggtggagatggggtttcaccatattggccaggctggtctcgaactcctaacatctagtgatctgccacctcgacctcccaaagttctggaattacaggcatgagccaccatgcctggccttgtttttaatttttgtgggtacatagtaggtgtatatatttatgggttacaggagatattttgatacagacatgcaatgtgtaataatcacattagggtaaatatggtatcagtaggtctcaacttttaatgattctgtgaacttgtcatgctgtatcccatctctggttccttcttagatggaaggaaggagggaagggggcatagcacctaccgtttaaattgggcacctgtaatcattatttggatcttgtcttacctgctccagaccatttgcagaagaaggaaatgagatatagattgtattacaccaaaaaagatatgaaagagccatgtgacagctggcagggagggtctttggaattgtagtcccttggagggagcatcatgatgagggtgaggcaggtctttattttgtaagtgtagattctctgtggcatgactttcactgaagttcatcaggttctaaggaacagatactaatcaaatttgcaagatagataagsgagaacaccaacttgttattttaaaaaataggttcccttagctgggaacaatgaactgtatgtcaaggagactcttcattggcaaatcctctcaaaagtacaaatgatagatcagtttgttttgtgagtgcagaattaaaacaaaaggagttgggcattcttggaaaagatttccaagaacccacrgaagcctgaggcaatgtgattcttctctttagggctggtgatctgaagrccatgtaggatcaaggtgcccactttcctcaaaaagagccaaaaaaaagtccaataacccattcttggtttttttagtgcttcttttctctagagaccttgcagggcatggcccttctgtgaatatgttgtttctagaaacagcagtcataatattgaagatgacaaatgttttacatcagtcatgctcattatggcttcttgagtagcttctcagttctgttgatggatgcacactctctccatagatatttacacgttatcttagaggatcactattgcagagatttcaacacacttgttgtgtatcctcaacccccaccaccactttagttttatgttaaaagggtggtgttactcaccatgcccrcaaatgtggaaacatcttgctttagcaccttaggcaactctggtgtattgtcagaagcactggcagagtctgttctctgtaactaactagttagataaccttgggaaagtcacttaacctctgaatttcctactcatagaagagaatattttcctcactgatttggtgaggatcaaatatgrtaatgcatgtgaagacactttgtgaatggtgaagtacaatcattatcttctaggatatttagtcattttctcctcccagttgtaaagcatctgttttcctaattttcaatttcttctccactccaactaatttcccaattttcaatttcttctccattccaactccatttccacaactaatgggttcattttcttttattcttgttctgttyattgactgtctatgcatgtttccttctgttcttgttcaattgctttgtacatattcctctcttatgaaaactccactgtggcttcaggctagatctagtcattaatgcctttcacagtctgatctccaccttcctctgatcatattccttcttctcttcttcactaatcttcagcgctagccagtggtgtgatgtaactttaaacaattccttctctgaggtagaaaacaaaaagccctgacttatggaatttgccagttttcattgtgtcaatattcccgccatgatcccaccagcttcaagaatggatctgttggcagagtttgatagctcacgcctgtaatcccagcactttgggaggctgagttgggaggaccatttgaggccaggagttcgagaacagcctgggcaacatggtgaagccctgtctctactaaaaatacaaaaattagctgggcttggtggcacgcccctgtaatcccagctactggggagcttgaggcaggagaatcacttgaacccagcaggcggaggttgcagtgagccaagatcatgccactgcactccagcctgggtgacagagcgagactccatctcaaaaaagggggaaaaaaagaatggctgtgtttaacagccagctgtccaatttcctggaaatttaacaatctgttctcatgagcctgtgcaccactagctccagcacaccactggttttaaccaatctagaatgagaactcacattgccttgatctgtcacacacacttctgtctcagaatgagcctttgctggttcaatgtccacttcccacaatgtcttccaccatacagcccttgaaagaaattcctaacagcttgagtttttggcagcttgtgtcccactccgtgaaacagaccagttcagttttttttttctcagacctcctagcacttacctgttctcttctctgatacactgataaactgatttctctctttatgtttagaatccgctccatttcaccattagctctttagcttcttgagggaaggatgtgatgtataactctctggttcctgattgtcttgcacataatcgaactcaatgaattgctgctgctgattttgactttccattaatggttacatttgattgttgaaactaaaatcttgggccctcttgaattgctctagtcttcattatgtagtaaatggctgtcccctgcctggcctacttgctgcatcctcctaaatcagaaatgatttgactatacattatatctaggatggtttcaaaatgattaatttgcttttaacttctatgttaagaaagctgactgtacttttyccaccttttctttaggtgctgaaagatgggcgtttggtaaacaagaatggatcatctgggcctatactaacagtgtcactctttgggaggtggtacacaaaggactcactttacagctcatgtgggaccagcaattcagcaataacttacctgctaatattcatattattaatgatcatagctttgcaaaatattgtaatgttatagggcgtctctttatcactcagcttctgcatcataygcttggctgaatgtgtttatcggcttcccaagtttactaagaaactttgaagggctatttcagtagtatagaccagtgagtcctaaatattttttctcatcaataattattttttaagtattatgataatgttgtccatttttttggctactctgaaatgttgcagtgtggaacaatggaaagagcctgggtgtttgggtcagataaatgaagatcaaactccagctccagcctcatttgcttgagactttgtgtgtatgggggacttgtatgtatgggagtgaggagtttcagggccattgcaaacatagctgtgcccttgaagagaatagtaatgatgggaatttagaggtttatgactgaattccctttgacattaaagactatttgaattcacctagttttctgtgctaatgtttatcaggagatttactttccaatcaaaggcaatgtcgacatttatttctacagtgaacgtagttttgagtgctagaagaattgatggctattccaagttcatatcaaaggagacctgacccagggcactcatagccccagctgtcccaccttaaggctatggcgtaatttaacaggcagaaatctcataacacaaagaccatgacagttaaaagttacactattttcagcatttggttgactttttacaaaatacacatattccatgctacttgaagtaaactagtatatttgttattgatcatttaattcagatactcttaaaattaaagaactgattttgaattttcagatttattttctgatttttatctcccaaagtatttttaagttcaatacttttacataaaaaaacacaattgaagcatttatcttttgtttttacatattgtcataaacctacttatggatttgattttaaaattctactaaaatacactagaaaagtaagattccttttataatctcgtggttagtattaagagaagaaatatggaagttaagccacactttgtatttaattttgagaagagcatacatattccctatgttcagcattgggacatcaaagatggcaattttaaagctgtaatgaacgtgcatttgtgtatatagtccaaatcatataatcatcaaagttttatgctcttttttctttttctttttctttttttttttttgagacagagtctcactctgtcacccaagctggagtgcaatggtgggagttcagctcattgcaacctccgcctcctgggttcaagtgcttctcctgcctcaacctcccaagtagctggaattacaggcacccaccaccatgcccggctaatttttgtatttttagtagagatggagtttcgccatgttggccaggctggtctcgaactcctgaccaggtgatccacccactttggcctcccgatgtgctgggattacaggcatgagccaccatgcctggcttctttttccttttcataaagtatgggacatttaaaatttgccaagttttgcttgaggaagttagatgttgtgcagtggttttgcagcatgtattttggctcttgggcaatgacgtttcatttgcagaagtttagatgttgattgaaaatcaacagctgacgttaaacaaactggtttgagtaagatacaagcaaggagctcctttcacagaaagggacagttctgattcaagcttggagctctcagctgtacctcagtttgttaaaaataaaaacaaaaaacgaaagcaccaagtgccaaggaaattaaagagcacttaatgctctactgtaaaattgcctgcaccacattttaacccatctccaccgtggtttctcacatacattttattttatcaaacaacccaagcatagtttcatttggcctttatatttctttgataactatctttcatcccattttattttatttttacttatttatttatttattttttgagatagagtctcgctctgttgcccaggccggagtgcagtggtgcgatctcggctcacttcaagctccgcctcccaggttcacgccattctcctgcctcagcctcctgagtagctgggactacaggcgcccgccaccacgcctggctaatttttgtatttttagtagagacggggtttcaccatgttagccaggatggtctcgaactcctgacctcatgatccgcccacctcggcctcccaaagtgctggaattacaggcgtgagccaccgcgcccggcctcatcccattctaaaatttcatgttagttcttgagtcccttgtggttctggagatagtaaacaaagctcttattttctcctatttggctttcattaggcttttttcctgaaatgctcttttacaacttcctggttacagccccctgtattacaaagtcacatgctcagcagcagccttctctcagggctcactacctagccttccttcattcattcaggaagcattgatcacttactatatcccaagcactaagtactgagacagtggtctatgtattctctttgctccctttgccactctgtgacattgccccctttgatatgatctatttccataatttctatgatatgctcacaacctgctttgcaactacactgcccctactttctactttctttgcattttgacctgtcctcatagtgttggctcattgctctgtacaggtgatttctgtcagcattctttctgttttggcctctttcctaaattctttttacatttctaactccattctgaccatcattccaagatagtccatgggtgataatgttctaaaagatatctgaggctggatgcctgcttaggtcaatatggttattatacccacacccacactcacatgcttacactgagccacacgcagctacttccaatgaaagcattcctgagaagacatttggacaaagaaacagggacaactgtgaagaggatttcttgagtatgtaaataagacagaaagtacttggaatgggaaagaaaacatgcctgtaatcctggtactttgggaagctgaggaaggaggattgcttgagctcaggagttcaagaccagcctgagcaacatggtaaaaccctgtctgtaccaaaaatacaaaaagccagccaggtgtggtggtgtgtgtctgtgttctcagctactcgggaggctgaagtgggaggatcacttgagcctctgaggtcaagactgcagtgagctgtgatcacgccgctacactccagcctggacaaaagagcaagatcttgtgtccaaaaaaaaaaaaaaaaatcaacgatttatttgagaatttctagaccacgtgaagctaagtcaaaggagaaaaataatgagagtgaactgactaatttcaatttacctgtcttcaagaattctgtgacatcttatattgtttgaatatggattgaacaaccctgctaaaagctttgatcagttatgttataaacctttgcttccctgttctgtttcattttgcatttcagaaattaattttaaaaatactgcacatctactaccatctgatctttgacaaactggacaaaaacaagcaatggggaaagtattccctatttaataaatggtgctgggaaaactggctagccacaggcagaaaatggaaactggaccccttccttacaccttatacaaaaattaactgaagatggattaacgacttagatgtaaaacccaaaactataaaaaccttagaagaaaatctagacaatatcattcaggacataggcacaaacaaagatttcatgacaaaaacaccaaaagcaattgcaacaaaagcaaaaaatgacaagtggaatctaattaaactgaagagcttctgcacagcaaatgaaactatcatcagagtgaacagacaaactacagaaagggagaaaatttttgcaatctatccttctgacaaagattcaatatccaagaatctacaaggaacttaaacaaaaattttgcaatctatccacctgacaaaggcccaatatccagaatctacaaggaacttcttttccacaagaaaaaaaacaaacaaccccattaaaaagtgggcaaagggcatgaacagacacttctcgaaagaagacatttatgcagctaacaatcacataaaaaaaaaaaaaaaacttagctgggcatggtggctcatgcgtgtaatcccagcactttggaggctgaggcgtgctagtgctatgatcaatacaaggaccagaaatggatcaattctaccttggaagaccagaaggatgtcacagacaagcagaataagataatcagggcattctcaatagagttagtcatgcatgcaaagacatggaagtatgcttcaagcagtgtttaatgtattacggaggaagaggatgcaaggaggaaggataaggacagacgatgtaaaaaataagactagagagatagtccagagtcagtgttgaaacacaaatgaagtctagactttatccagaagctgagagaaagacacattgaagagttttagagtcaagtagccatgagggactaaacagtttaaaaactagataaatttgatggctttttgaaggatggagtggagaaagaagttctaaaggcagagtggccaggaaggagccagttgcagcagtcccctcagggtagtggagacagtacagggacatgcttgaggaacagcaaagaagtcaatgcaactggagccgagtgaacatgggaaaagtagtaggaattgttagaagtgacagcttatagtggtttttttaggcattgtaagaacttggccttttactctgagtaaaatcgaatgccactgataggtttttttgtttgtttatttgtttgtttgttttttgagatggagtttcactcttgttgcccaggctggagtgcaatggtgcaatcttggctcactgcaacctctgtctcccgggttcaagtgattctcctgcctcagcctcctgagtagctgggattacaggtgcatgccactgtgctcagccaattttgtatttttagtagagacggggtttctccatgttggtcaggctggtctcaaactcctgacctcaggtgatctgaccgccttggcttcccaaagtgctgggattacaggtgtgagtcactgcacccaggccattgataggttttgagcagaggaatgatatgattagtcttatattttgatagaatggctctgattgttgttgtgcaaaagtagaagtagtggtacaaaaaccaggtgcaagggtttgggaataatccagactagtgataatgacggcttggaccacagttggtgtagtaaaagaccacttgcttgaacgtgtgtagagtgagagagacagaaagaagtaagggtgactccaagggttttggccggaacaaaagggagatgagagaagccgttaattgagatctgaaagactgctggtgaaagagcatcaggagcagaaggtcaggagctcagttttgttcatgttgatcagataagccttcatacagtcaagtggagattttgagtagactgttgccagatataagagtctagagttctcaagagaggtttgaggtagatatataaatctgtgagtcactaatattaaatatatagatggtatttaaagagatgaaatggatgtaatcacctaggaagtgagtgtagataggaacagaagacttccaaaggttgggctccagggtgcaccagtgttgccaagtcagggatgatgagtagaaaccagaagaaaaagtccaaagaaacaaaacaaagtaaacaaatacaaaaactaagaagaaagaaagaggaaaactaaaagggtgtgaagaagaaagtacattaagaatgggataatggcagctttgtcaagtactaccaagacattgagtaagatgacattgagaattgaccatcagacttagtaatagggagattaatgggaactggacaaggcagtgaagtcatgggggtaaaatcctgtccattgggaggacaggaattgaggcaaggagtacataccatcgtggaaaggaattttgttataaaataaagctgagaaatggagcaggaattggaaggggatgtcagatcaaaaggcttttttttttaagatagaaaatgttacaggatagttgtagaatatataataggatatttgtgttttctttattgtatccaatagagaaagaaaaattgatgataaacagtaatggggctgggcacggtggctcatgcctataatcccagcactttgggaggccgaggtgggtggatcacttgaggtcaggagttctacactagactggctaacatggtgaaaccctgtttctactgaaaatacaaaaatcagccaggcatggtgatgtgcgcctgaaagcccagctactcgggaggctgagggaggagaattgcttgaacctgg

SEQ ID NO: 94956 - DNA, 300311 bp, Homo sapiens
  misc_feature (1)...(300311): n = A,T,C or G
agcaaattgcccaaagggctacatgagttggcagtctctcaaaacaaatgaaataccagagaaggtttctcatcacactaaatgtttgctgccgtattggcatagggttataaactggagtatttagacatccttcacttaagcaactattttatttttcttaaagaaggaccagcaagaaggtcctcaccagatgctggcccttgattttgtatttctcagcccttgtaataaataaattactttataaattaccgagtttcaagtatacttttataagcaacagaaaatggactaagacaggtggagaggatggggagtatgttcagcttgagatgctaccttgaccctttggtaaagataaccaggattctgggaaggacattcatgttcttaagtcacctatttagaggtgaaagaagagattataggatgaatcaaaggagagagcattgtgaagaaagagaaaagaacctgcatctaggtccatttttgagtgtcattaagaaaaaagaggataagggcattggctcatgcctgtaatcccagcactttgggaggccaagatgggaggattgattgagagcagcagtttgagaccagcctgggcagcatagtggaaccctgcctcagcaaaaaaaaaaaaaagaaaaaaacaaaaaaacaggtgtggtggcatgtgcctgtaatcccagctactcaggaggctgagtccaagttaggaacactgataaattgcaacgatctacttgtactgaatatttctgaataaggatattataatatcaatgaaaagtataatgaaagcttttcaatgtgtcttctttccaccacatttaatagtacacttggaaacaatttcttcaatggttttctattttaagcatatattctcagcagccccaacacaccttaaaatgacttttcctgttcacctgattcctttattccaccactttctcaaaaaaactgatcagccagttaacagaagactgctgtcaataataccaaatgcttcctggacataaaagaggctgaagattcaggaatgactaataggagaccattgatgatagcttaaagacagcagtctcagtaaaggaataggagcagaagtaatatttctaggattaagaagagtcacaaagtggatgcactgagggctggtcactttttttgagaaagtggaataaaggaatcaggtgactatatgctaatgaattcaaaggaacaagaaagtaatattgttcatattttgactattattaatattttaaaatgttcattcaaagtacttgggagattgattagtatgccaagaaaaatattgtgtgaagtgaaaatagaaaaagaaattacatgtaagttgttagaatatgaaaatagcatatgttggtaggaattcaaagtgaggcaaaaatataatgcaaccgaagaaaataaattcggactcattctaatatgttaatgagaccacacctggaacaatgcattcaatgtgggatacctctaacaaaaatgaacatctaggaaattggaaatagttcagagacaagcaataagaatgattatgggtttgtaaagactgaactgccacaagattaaaaggccttctatttgtttaacgtggctaacatgacttaaaagtgagcatgatatctgtttataaacatctgagggctgagtgtaagcatggaagaaggagtagagttgcctaatatgctactaaaatgattcaactggagagaattttcaagagaaaatctaaaagtaaatataatgaagctgtctcccagaaaatgtgcatttcctttctttcagaggccctgccaagaatgaggaaatttagcaggtcccctgaagatttgatttcttcactttcacaaactagtagaaacctttttaagcttgatctgtctgcacaaaattactcagaaagtgtgtttatttatagattttagaaaaccggcagcataggactctagattcttgggcaatcatattttatcttcatttattcctgtggtctgtcatcagcagagaggtagattaaaagactgttcaaccttgttcacattaaggttggtctttaaaactccatacttccaaagctcaaatagtttggcttagaatttactaagaaacaactgaattattgtatttttgaaaaattgtgtatatttccagctagagttcatagatataccaaaagttgctcaagagatttactttgggattatttctacaagcatccagttctctgcattctttttcaataaatgtagtgtcttatagcattttttagcctaaaatctgttcttactaaagtgagggcctggtttttcccttaaggttgcttttaaatgaaattaaaacaaaaattatgttttggattatgagctcctagagcgctttgtttaatttgacttatacaaaatctaatgccaagacagtgccatgcacgtttgaaaaataaacaaatagtaaatggtaactgcagaggcatcccattccagaggagttggttaagggaattgctaataagtgaatcttatatttccactgatttaccctataaagtcttatattttttatctccccactcctcccaaaacacatcccttttcagactgagttgaacatgtacaaatattctgagagcctgactcatgtcatgcagggcccactggtgtttttgaatcacttcaagaatctggcagcaggtctctgacttcaatttcccccatgtgtctttctaggccctttgcgtttctcccactgttctactttccctctcttcttcattgtctgtactgtattgcactactgggctaatagatgctagggaagggtaatgagtaaccggtacaatatttcaggaaagtgatttgctttttaattgtgcatttatgaattgtttgcattttaccacaaataagatagtaagtaaaacaataaataatacatgaattttaaaaagacgcctcaacttcagagacttcaagtatattttagacaagaaaagcaataattaaataagcacagaatttaaaaagtaatacctcaaagtaaattggacacaacattttgttccggttatgaaaaggggaggcttgaaaatatctcttggtgagcctgagggacatatggaatgtaattctttaaaccaatgtttctcaaactgtatgtgagataattttaggtggtacatgagaaataacttttatttctacaatataggttcctttgcaagatcatcttctattcatggcgggttttattagttttccatttatggtgactataaaaaatgtcctttatcagataaacttatttaataaaaatagattatttaaagatacatattaagtcaataatataggcgatatggctataattataaaagtgatattcaatgtaaatgctggaaataaggcctcatttaagcaaacaatacatttttgcctttataaccctaaaattctgtttcctatgttaaacttatttcaaatgtgtactgaaaattgacgttttatctgacacctagtggtgtccatgttaatatatgtatatttaagacaactattagaaggtagtaatatgaagtcaaataactaatatattatcctggattttaaaaataatttctgtacatgtattcttatctagatgtacaaaaaactatgcaggagcaaagtgaccttgaaagcaaggtcagtgtaactgaaaaatctgactttagaagggtacaaagaaacatgctaagaaaacccaccctatatttatgttaacaatatgctaaagtatgaatttttattttattcaaatcatacatctcccacctttatttgtaggtgaaactagcacataatgttttatgccaaaatgaaattcaaaatgttgttgccttttgaggacagtattaaattcatcattgtacttaatccttacatgatatttgctatagccacagaacattcttagacactatgattcacaaaacatttaaattgcatatttggcttgtaatatattacatatttaaaagaattactatttttctgaataccattaatactaataatagcatcacagtgactaagagtggacttaaataaaggctggcttgaaactcaggtctgccatttattagcaagcttctaaaaattctgagcccttagttttctcacatgtgaaatggagaaaataaatctgcaaaattaattaaatctgtccattcatatttttctctccagtgtatattaactggcattcctcgttaggccagaatgtgctctcaaccatgctccaaatccgctttgtgccaaccccactgccagaaccctttctaccttgagaaccagaaaaggaaacattatgcctggcaatgcctacaccctccaaaataaatctgcaggaaagaacacccagtaagtgatgagagcagcaacgactgcctttatcattttaaatttacaacaccaccttttctagagcctcttaagcattgtagataattccccactcattaaaaaataaattgtaaccataagtattcagggttgatactgcttttgaattagacagtgctcatatcagttgcataagaccaacctaaagtagaggatgaaatcttttttctgaacctttttcagaacgtaacttagtgaatatattaaaactaaactttctttgaatgggagtaatttctacggattaatctgtaatctcttagaccacacctaaggtaatgtagaggttgttgtatcataggctttgtgattagagaccactggatttgtctttggaaaagtcactcatgattctttgggctttggtttcctcatcttttataccggcttaataatgaccaccgtagagttgtcatggaagttaaatgaactcatgtaccataagtgaccaatacaatgattgacactcagtgatttatcaataaattaaaacatttattatcaatatgacagagaaggtgccgctaaaatagacaataggtttttggaagaggtgattaaatggatgcaaaatttatggattgtttattccgtctacctttgctgtgtcccctggttgtggcatacacacgtgtgggtataaaatcgtaaatcctatgtagtcgcgtagtgcatgcgcagaaggcttagacacgaaatgtcatttcagcaatgtgcctagagaagctctgacgccgccttggaagtaagtcgttgctgcctgacctttgggcgtctgggacggatgcctatacctgcacccagcagcactggaaggggcccaggcccttcgcagcacagcctatccccagaccgcttagtccttcataacatatatctccacggaaaagggtatttcctcccgtcagaaaaagcgccccagtctggtctgggttggtttttatttcacgttgttgcaagtaggcgaagtcccttctgtctcctcccttggggtaagtggaaaggagtccggcagggggcccgcagtggcctgcacaggggaactgggtagcgagagagttccaggcaattccgggggctgccccacagaagcaggtggggatcgacagtggctctccggcccagggaggagagcgcggtcgcgggtccctcccctcagcctggaggctgcagccgctcgagtcggcccgggtgggggcggggtgggggcggcgcggagggcacggagattacggcggcgccacccgggacatccagggccccgaggccctgggcggtccccacgcgagatcgcaaaccatgacaataggcagtcacccgaggtcaaataaaaacggagtgggtcccccgcgcgccgccgccccccgcgtccctggcggcctcccccgaggcccccggcggcctcacgagcccgcagtagccggtggcgacgtcgcccccgccccacctccctgcgcaagtgcgaggctgccsgcagcgcggcgcacgctccggccgttcccggcttccgcgcaaaacttccatcctgtccacgtgaagttgtcgctgccttagagagggggaaagagctgcgggaaaagccggggagtgacgactgcggcggctgggcgcgctctctcattttcttttcttctcctttcccccctgtcgcagtccggagttttggctcctctcctttcctcctccccctcggagccggcttctccctccgccccgcttctcccccgcttgtgtacgctatttgttgtggggtggccgaaggggatgtcctgttttcaccagaggcacagcgcgaaggggaaacttcgacactggaaggaacgagaataaatacttaattacggacgcactgaaccgcggctgggacagacacttcgggaacccgaggcggaccgggcgacgaggtgagtgaccccttcttccaacccccgccccagggctcccgggggagcctgagttgagagaacccccaaactttccgggaaagtgcgcgaggctccgccggggacgccgagcgctgggtactgaggacgcgcagctggacggtgcgtgggcgcctgcgtccccggggggcgcttggaggccgggtgccccacgcctgagggcccgggccgctcggaccgcagcggtgctctctgccctagaagacgtccccaagccccaagggtcccttccgagcctgcctgtcccttccggggtcggcgcggagcctgcgcgtaacggagttcatccagcagtccagcgcgcggcttctacctgcaccccgcctccacctggcagaggcgcgagcatcggggtctcccccacatctttcttatgacgtgtattactttctgatgaccccctagatggtccaggcgcgaggatgctgacccagagtccttcggagggtcacaggcgcctgggctttcccggtgccgggtgcgtgtgtactttaaaggctcgcgttctaatctccaggcactgatcgsgcttttcaactgcggcgatcccactttaatagtttttatgtggcgtggactgaatgtctcctgcagtttgccagggtcggtgaaattagaggcgccttgtcagagcagtcgygttcattggctcgagtagcgggtgccatggaaggcttataacttctccaaaggaagggacctggctgggtagagcaggtttttctctccttccaagcctgctgggtctggggaggcagtggaacttgaaatggctcggatttttagcgtggtgaagcgaggtttggaagtagacgtgtgtgtgcttgttttattctgcgccgcacagcaacccgaactttcgtttggtagcacttgaaagagttttctccctttgtttgcgagattctgaacagctcggagcgattagggaatttgcggaccgagtccggtggcagagctggggcgaaagcagagagcgcaatttaatttttgtcatctcttccctgcttgggaggatagtgtttcccttcaccaccacccctctttctccttcctatgaagacaacggatttgcgcctggggtgagagtgtgtgcgggagagtggtgtggagactgtcctctctcaccgcgtctcctgcgcctctccccgccatcccgagcgggcctagagagtcattcatgaatcttaacctgagggcaggggaggaaggtgcaggtccctctgccctttctgccaaggtgcagaatagcgcccgggcgtgtgttttggttccagagcagttccacgtggagcaacttcgtgtgtgtgtgtgtgtgtgtgtgtgtgtgttgtgtacttgatctgtgaggaggtaacaggactctggtgttcaaacccagtgggccgttggccattagtttgctttcctggctgtcattacagacacttccaaaatctgatacctaagagaaccaacaggttaggtttcacattaagggctcatacttaacagttttctttctcccttaccccttttggcttggcaccctgggatcaacgtaattgttggagcgaaatacacctcctggaatatggcattttgttcctcttctcatctgtggccactttgtgaaccctcgggtgtttgtcagtttcagtgcgggctcctgcgggatttaggtgggagtcttaggagcgtttaacaaccgcgggctccccatcagcagcttctgaagtttcacttacacgtaggtgactgacaggattgaaagttgacgatggtttttttgtttgttgcgttgtttttgtttttaaaaccttagggaagggattgtacttgaattcctttcccgggtacggtttggttttaagcagaatcagtgcctttttttttttttttgtcttttaaaatattattggcaagcttaaacctgaagaaccaaaaactagagggggtggggagagaatccccccaaaaaatatttgatacgtgatacggagcgttttaggagactgcattcaaagacatttgtgtatttttaaaaataacattatcccaagaaacaaaaagcagtagtaacaagagacagattgttttgtgtggagcaagactgccagaatctgatttttatrgcaacaatatcgaaagcagacataactacacccacatttattgttataaaccgtaaaaatagtttgttccacctgattaaaagttgtaagtcattcaaagttaaacccgtatttaggaatgactgtacaagaatgttaaaacctttgacagctacagctttgaaagcaacataattagatttgttgaaaatgtctcctttctctgattattagtgatatgtacttgtctttcataataagtaaaggtctacaatcaatatggttttcaaaagcctgttttcctttgtaaatttcctgaaaatagtatgtttcaatatttaaagaccattgtaactaccggttggttcacaattataactaaaataagatttactcagttgttttctttttattagtatttgttgaatatttgaaattgaatttctcatttccaaaataaaacgtctcacatatatgtatgtactcacaattaacacttcttttaagtagtaggcttaagttttaaaatttttaaaatcttaagatttgtataaaaaggagtgattgtataaaaaggaataataattattaattgttaagaaaaatagatgctgaatttcagagggtttctagaagctggagaaaaaaattgcatagaagtttcttttttgacgggtgactggcagatgagttacttgtcattttgctataatttatttttttcttttaataaggctctttgggttaaaaaaaaaaaaaggaaaaacaagtactccatttctaagagtttcctttttatttatgttgtactttggggtgtaaataaattttacatagccacgggaaatagagtatccaatttcatgttttcagtctctgttgcaagctctaaatgactgatgtcgtgtctaaaaatatatttatatggcttgatatttcattttaacattttatgcactggaattagattttttaggatttttagaaagatagaatgacagaaagacgatgactattgttataaaaagttagaatgttaggaagttcacattctaactttcaaataatcaaacttattttgccccacaaaaactcacagtttttatacagatttcaagaagaggggtgataatctttttcactacttagttaagtgttaagtaatttaagaatgcaagtatgtattatgctttctcattatcatttttttctgttaggtaaatgcaagaacactggacattctgtaaaaacaggcccctctttataaggagtttattcaccatagttctgtattgcagctgctgatcatatttcatggagctgttaaagcacttaaaacctaaaattaggtactgtctggttgtaaatatttcagatcacttatttaagaaataaatagaaaagtgtgctatcaaaagtaggagacgttttgaatcctctcattgaagagctgaacaaacctctatcaaaacaccttcttcttttttcagtgagaatataatcttgacagtttytttttctaaatggatattattcttacatgtactaaatgctaaactcttataacgtgcctccctgtagagtatcttaaactaattatattcagaaatacagttgggggattttattacaatggttactaggtgaaggaaatcaacaccaggggaatggggtggcattgcagtgtacctgcttctctcatgaatttttcctgctaaactaagaaatgacatgctgtttcaggcatttgccctggagatgggtgagatgcaatatgtgtaatgctgcatcttatagttagatgtgttttaatgaaggggacactgcatagtcattaaatcatttttggagccaaacttggcgtcatttagcttgaacttaagtggaagaaaatgaacaagagttacacattcaaaagaagtacaagcaactttgattgcttttaagaggtttgaagactttgtaaacattactgtcactcaatattgcttgtggagctgtacattaatatatgctttggtgatatgtcattttacgcttgaaatttgtcattcttagtgtttctccatccatctttttattagtaaagagatactgaaaatgaacactactattcttactcccctaacccctttcacacctccagaaaaagagatgaaactgattaatttaaaatagaaaccattttgtgttatcaaaaccacatttatatagtgatttgagacagtttcagagagtgcacctctgagtctcactgtaaccttttttgtcattgaaaggtgctaattgatcttagggtactgacacaatagtatagtttgatatttgaaacctttcagagttggtctggcccttttcttaccctgagatttcagtgcatggatgatgaagaaagacaccattctaaaataccagaaattctcatttttttccaatatgaaatgttttaatacagtatgttcatatttttaaagcttttatttacatacagtaagtaaatttattttaacgtacttttggacagtaggagaaagacctatatgttctatcgtgttagaattttttagtttttttttttctgcacaggtagtttatttaggttataatttttaggcaaagtctgattcctattatcacatgaatattttcaaagtgaaattgcgttaaaccaatgtggaatagcttttgtatcaccaaggcatatattaatgtagatgtcaaatatgagagcatattttcttgagtatatttatatcctaaagtgtatttttaaataaaagtggtcactgtagtctttagataattacaatttggctgtcattattactataatattaatcactatcaccatcataacatcatagctagcatttactcaggaatttcgtgcaaaacactgttttaagcatttatatggattagctaattttaatcttcttaactatgccgtaaattaggtacttttgttattcctattttacagataaggaagctgagacccagtcatgcagcacagtggagccaggatcctaactccccagtatgaggccagcacccttatccttaagcgtgtgctgggctcttgcttccatcagtcatataccaccatttttaggtggtacctgaacatttygttttaataatacttatattttatgtaaggataactagatattagaaaaatttgttaaattttgtattaaacctgtaacttcatgggcaatattgtttgagacaagaccaaacaaagtattgaagtcaaagaaaaaaaattaagtatctgaagaaacgtattaagtaacagtgaacaagaatatggcctaaataaccacagtcatgaaggctggacagcaaatgactgaatttggagaaatgctgtattttgtaatgtttcccaattatcaagaacttatgaccagatcttttaaatatttaactaacatgtggaatcttcctttgctcttcaagccttatccaaattggttaaatgttatcaactttgtattttctttgtttttgttttttgttgttttaatgctggttttgaatctcaaatctgcacatttatgttgaaccaactaataaggcttgaagagttaaagagtgcatgatggacttctggaggcaggtttaaattataatggagctgcccatattttggaaatacattcaatttatctggttatcgcatgtgwaaggttttctgtaggtaaatacttttgctgttaataacctgttttacaattttatagtatttttccactgaagcagtggttttcatttttttatttacttatatactcagccacggatcctttcatttaaatggaaactgatgatatgcccagtagagaaatgtgccactgctctaggtgaagcaggatgtaggtagcctgagaatgactcaccaacagtaccctctcacggtggccgccgcctctggagttctctctaagtgtcttcaatgtatggaaactgctgcaaaaaaattcaagtcttctgacaaaaggggttaattcagagtacctgccctaacatgttcatgtggcatcactaaaaaacagactgtcagatacggtaaaatatctcccagtgtgacatatcagcagaaaggtgtgtctactctcccttctataacttgagtatccgtattaaccagtcttcaaattcgatttagcactgagaaaattaaaactgatcaaaatgttccctgtgtgtagttacaggtctgaatgaggcacaaaggacttgtacctgcaaaggttgactttattaattagaacatctttcctcctttaaagactgtaagaagaaacaccagcagtggcctaacttgacatgactttagattttcacgtaaattattgctactatttctgttatcctttccccctttctttttaaaatgaaagggacatttcttgtgaaagactacaattaaatcataaaaatttacattcatgtgccattaagtttaattctactcacaaaagcaacastacagagtttgaaattctatccctaatcaagtaggtgtaccacataccgggagggctcattatgcacaaggtcatatatacaattcacagacctctgcatatacccaacggagtgatctattcattacatttcacctctgactttgaactccctaatgttaaaagatttgaaaagaaccgaatgttctgattaagagattgaatatttctaacttaatgttttcagtatgttgaaagtgatgatgacttgggggaatcagcagatctctacattacctaattcttttctcttacatttgaatgcaaatgtatattcayrtgcggttatgactcaagtcattcttgctaaatttaatgacgttgtaggtgaatcacattcagatttccttttgcaggttttccagtaatctaaaacaatgcttctagtaggtaacttaagcatgcaaacctcaataaacctgtcaagaanggcaattctactgttttattttgtttttttktttgtttgtttgtttttgcattaactttagttgataagatgatggtactgttatttttcttagttgactcatgaagaattttaatttaggtctagttttttcccttaattgttgactttagtttttaaaggtttcgttcatgaaaatggttagcaaagttgtgggtacttggtaaatgcttgttaaatgctttttccttatcagtgttgctgaagacttgcaaaattagagtgggatggatagatttcttttctactctgcatggctttgaagactttggagcttttattgtattcttatatttttacataccattcccaggaatatttagagagagaatcattgtaaccaaggtcacaggtctaatcctcaggtattcaaattagctttaggtggacaattgtcctatacacacttgttcgtattaatgttgtcataacaaatatagttataatatcttgatgcctctcctgrgggcccattctggactgtgttgaagctgtctctaacactctctcacgtccctaagatattcaaccacatttgttcatgatttttatgaggtccctcctggacttaaaattccttaaaaaatttgcctgctgcctatagggcaaattccaaaattctctgcagggaagataacccttcatactgagaaccttgctcaggttgctcttctcatctctcactccccactcacaacaactctcttttccagctgtatggaaaactgcagttctcaaatacaccttggacatttccacttcatttctttgtgcgtggaatgctttttctctggaaaacatcgcccctctccccctgcaaatatcttttctactgctttttcaatacttaaggtgcaaaatgttagctcctctgataagttcctctgacctccagagtctgagttgaacgtttctttcttgttactcccaaagcatccagcttctacatttaacatagcccttgccacattgaaatgtaatagattacattagtctaaatcctgctttaagctgagaatttactggaaggattagctgtatttgtcatttctgtatcgctaatgcacagtgcactgctggacatatagtcagtaggtagttgttatattcccattgaatgaatgagtagaggtactgggaatgagagcagagattgtgacactgaacatcccctccttgagactgggaacagtgagaagggcagtgactattacaaggtgggactacctcaataacaacctcagggrgttttggtataaacccagtagaattgcagctgtgaatccaggcttaggttatatgtatgtatacgtgaatgtagaaatgtgtttatttcttaccactgggaagtcagtgatctggtggataagccaaggatcctgaaaatctctggagatacggtaatttcatagtacttgaaatctgagagactcagttcttatagcacagtgagtaagtagaaagaatatgggggctgggcgcggtggctcacacttgtaatcccagcactttgggaggccgaggcggatggatcacctgaagtcaggagttcgagaccagcctgaccaaaatggcaaaaccccgtctctactaaaaatacaaaaattagctgggcgtggtggtgggcgcctgtaatcccagctactcgggaggctgaggcaggagaatcacttgaacccagaaggcagaggttgcagtgagctgagattgcaccattgcactccagcctggacaacagagtgagactccatctcaaaaataaataaataaataaaaaggaagaagaatatggagccaggcacttgggttcagacctcagctctaacattgatgagtttgtaacatcaaacacattactgaaacagattttgcttcagtttctcatgtgtaacagaacatgcctcatggggttctgatgagaattcaatgagtaaatatatgtaaatatatttagagtagtgcttgatatgagtatcagttgttattactatgattgggtatctttcattagattacccccaaatgttccagagatatttagagctgaaggtcttttttggggggctatggattggtgaccataaatggagtgtccagtagtccaagtataaattagatactgtgggtcatcttggcaaatctgaggttgtatttggagccttaagagaagacactataggtgctcaacagttggcattggccatttacgttgtgcagtaatatttcttttagtaaatatttccgcatacagtaatctagattgttttagagctttaatctgtgtggttccttaactactttaagcaattataagcacgttgtataatggtagtactttatagccaatatttaagtttcctcagttgcttttttttcagccgtaaggtaccaattatgagaatttgtataattttcaatagtcagtgggcctgatgaactcaatgtaaactttttaaaaggtagctttacatattgctatgattcttacctttagagagacagtaggaggtaattagtacctctacttacagaatttatcacttggattcagatataatggctatgtggcaggatggggctgaaggaaaaaggaaagttaaaatattaattgtcaaggtctcatttttacagcttgtctggaactgctaccaggtgtatctgtatagttttaaaaatgataacgttgtacctgaattcttcagtatatttaaataagagtttttcaagctctggttattgacattttgggctggataatttattcaggggatactgtcctgtgcctggtaggatgcttagtggcatcgctggatgccagggaccctccctcccctggtaatgatggtgtctccagacattgtcaggtgatctctgggagcaaaattgcctcttcttgagaacccataacctaagcagatcttaatatcatttgatatagtcaaaaaactcccagggctctgcataagaggattgttctatttccagtcaagtgtggagaatcctaataccttcctcccaagtttaaacatgaagtcaaacaattctcattagtctgtgttgatagattaactttgcacagaggggatttacagatacgcttcacacagattgaccatctccagcatattttccttttctggaaataatatatgagtgggagtaacagaatacctgagagagagtatgtaggaagtaaatatttatttgaatcatctatgtgtcttttcttccrgttatttgtcagtagatagtttggatttatttttaaataatgaccattgcctttcyatttctgtgggtaaatattcagtaataagaaacttttattttatttagtctgtagtgttagaaaaggtaaagttactgataatcacaactgctgaagattaaaatacttagtgagttaaattatttgtttgtartgagaaattttcaaaagaattatgtgtagctttcagttgtaaccacaagttcaagatcttgagttaataacatttgtacagctagaagaaagtaaaaataaatatattacatgtaaaaactctcttttgtgaattctcagatccaaacttttaagttctcattctatgggtttgatgttgaccaatacattttatctatgaaatgatatataattgatgtaagtaaatttgactgttgtttgggcaccacccttacataatttaagcatatatgaaacacatttcaaaaatcacttgaacaaaatgggaacaataatgttcacataaagtgagagaggataacttttcccatatgagttttgggttgaatttcaaaattattctgaaatatgaaacattaatattataaatatatgattagactaattttcttaagagttctaaacagtagataatttttatcttattagaaattgcaaagatacttgaaattccacacttatgcattgtctaatttagtggttgtactttaattgtattaggtagataatcatggaagcagtcagactaacctggagatttcacatcatttactaattgatgcctaagtaggcagggtagaggtacttgaaaacacacacacacacacacacacacacacacacacacacacacacactcactctctctctctcacttcctttgatttgtgctttaattttgaaatgtgtgcttaggtggcaaagggctgcaaatacagcatactgtgtttgaccaaaatatttttctgtttcctaggtggagaaggaccctgcatagctccttgttagcagagagataaagtgggtgctgggcaacccaatgacaggtggaggccgttctcggggagtgttgcggagaatttgagacaggggtttaaatcacagatagtggaggagagttctgcttcattcatggacaggaagtccaaagaaggcacagcgaaccacaggtccatccaggcactttatgccagatattgaacgggaagcctagtagccctttagttactggagaacggccaaaaacccagaggttctatttttccaaatgagcacttcctgggttcataaatcaaggaaccccacagagtattcaagtcacatatctcctttctcaggttgattctttgtatagtgggtcctaatgtggtaagacttacttatgaacattttatttcttataatgccgtcagtcacttccttttttctccctggcatattctcaccacccttatcctccatggccccaactcccttaacctacttgcctagtgctcttttgctgcctacctggacaaaataataataataataataatctactcatctttcaaggcttagctcaaatgtcacctcctctgtgaagccttccttaaggctcaggcagaattagttcttttctctgtgtaataccatagcactttttttggactgttaatataacagcagattgtgttggggctcattgtatgtgtctgtcttytagagagactatgaactcacagaggggagagatcatatctttttccctccgtaacctcaacacctggagatgttratggaaattaagtgactgcactattccatgcatatctttaaagggcattaggtcccaaaccagacatctgcaaaggatgaatcctgttaactttttggaaaactggttctcttttgcttgtggtcatgaaagctggtttattggttattttctactccaacttatttaaagcctcatttgtaccaaagtattactgattttctagtggaaaaacaggtatgtccggcgtacattggtattttcaataaactgacatttaaaagacagatttctcgttgaggtttatggtcttcataattctagttttctccagaaacagaccttgatctctttggttgccttctgctaagatcgatttcatgttattttgaagaatttttaaccctcagaattatagatttcatttgagagaaagcatgttctgtatttgtttgtgtcagtgtttcaaaatgtgaggaccaaaaatcccagatgtatctattaaaaatatacgtggccttttgctgagggaaattacatcttttttttcaggcacaattgaggaagtaaaaaaattttgtttagtttttagtggtttgtttttaggcattttccatacaaagatkagcaagacccttcaaaaaccaccaatttgcttatttaggggggaaagtcttcctatgtccagaaataacattaaattaagattattgtttccaatagtttcaaaaattgtggttttattttcttgtatgagtcattttttagcatagtgcagtacatgattgcactacatcatgacaaagcatatttgctctgtgtttcagtgggtcactttatttatcagmgtcagatgatcagatcagaagagagatctagcctaacccttccattttgcagatgagatgttgtattatgtgaccttaagaccttaagtcatttactcagaacaaaacagaaaaagagaacttcatgctggggacacttcatgctcccaactctacatcttaccactttatttttatttgtttgtttctgatgaggagttgagaatgctggaatcagactacctttgtgtgtatccaggctctgccactcatcagcgatgtgactttggtcatgtaattttctgagtggctgtaagccatagttccagcatgtgtacatggggaataataacagtactcgcctcatggagttgtaaggaataattgaattcatgcaggaaagacatttggttcagtgcctggcccactataaaagctcaggttatagtttgaattgatatcttggaataaaatgctgagtgtatttgatattcagagaaggaaattcatgctgctaaagcaagtttttttttttaatctgttacttaaaaaatacaaataagtcatactttgtataacatattaaaacrgagatgatagaggttacttttgagaggaatgaccagagggagcaagagagaggctttggaatgctgattatgtcttttatcttggtttggttgctggtcatgtgaaagtgtttattcaataaaaattcatcagtgatcaacttttgatttatgtattttattttactgtgcatatgttatactttcttaaaaagttttaaaaatacggatatatttaaagtaaaaagtggatttactcattcttattctctgcaaatcaggataagttgttatacttagatgtgcatcttttcaggcatttttttttctatatatgtgtaaatgtaataactatgtgaggatgtaatttattttcattttacatttttaactccaataggatcattgatttccttaaaacttgcttttgatctgctgaatcttgaatatttttccacatcagtacatatagttttgggtgcttctatttaatgtatgcagatatttcataatttcactgttcccctcttggtgtatgtttacattgcttccatatttttactattactaagtatgttgcactgatgatttttatgtctcttcgtacatctgccaaaaatatctgtagataaaactctagatgcaatattaatagataaatatgtatgtgcattttccatagaaaataccaaaatgctttttaaaaagatttatgaatcttgcatctttaaggtaatattctcatctttctcacaaaaaccaggtgcaaaaatttcaacttaattgaaccttgtaattatttgtgctctggttaagaaaaatggttatagtagtaaattccttgaaactcatatagtaatcggaatactccactatgattaggataaataattctattaacgatatatatttaatatatacatataatttatataattagtttctcacttaagaatatttagtattcatttttatgaatgcatattatatttacttatggttcgtaagcccaaatgttaggaagaaataaatcagtaatattatattcactacatttttttttacttagtaccatcaaatatttaccagaattattaggagaaatggttctaactctcatgtgattggtgagaacttatgaggaatgatatattgttattctagtaagagcctactctgtgccaggcacagttctaagcaccttacatatattacgatagctttttaacatagagatgaaaggtatagacattgtataagtaataaatgacattactccattataaatgtgttgataaatattattatacatgtcacaatatcagttgtgtcatatcaatgactaatttataaatctgttacttattataatctgtttaatgtggaaataaaagttaatgcatcaaaatccagaaaattgctactcaaatgctggctaaagtaatctgatagatacagttttaaaatgaagtatattaatcagttgattttgttgttmgatttttatatgtagaaaattctgtctccagaatattcagttcttgtagtttttggttaagattttgattaatcttcaatggttatctagtgcctttaaaaagtagtccaactcagaatagctaatgtattcctcttgcattgaataaatatggctatcaatttttgtggggttttttttcctgcagaatttcctgttattctaagggattcaataggacttacacatataaaactgaaaattatattactatggggaagctgctttgtgcctttcagaaggaactctcttgctaacttaagtactgtatgtgtgtagaatagctaatattttcctcccaagaaatttcatgtatgcagttaaaacactcttaaattgattaaggatttgttatatatttccagaagcactcaagagtacttttatggttataagagtagagtgcattagaatgccagaaaccaatgaatacgctagaggccttcaaaactgtgcccaacattcctgactttaccatataaacatgtggggtagcctggaaaaacaaaacaactctccttcccccaacgtaggtgaggcctgtgatgataacacttcaactggcttgaatattaatttgatacttttctgttagaagtaatttttattacttagcaaatgaaatggagaggtaataaatatgactgatatttatttcttgagtaaagtattattttayatcagattcgaccagttacctttatcctttttggaaaatgtattatacaaactaccacagtattttgcctattaatcagggaagctaaaaaacnttttataaacgttgaatcaaaactctcactgctgtgagggaattaaatttcaagcaatatactccttttatagggtgagaaactgaagtatggagaaattacaaggttttcccaaagctatacactgagtcatggcagacatagaaatctacaattctgtttgcctgattcaatctgaaacttcatgaaacgtaatttatccatttcctgacatgtgctttagaagtatatttccttatttgcttatttatgctctcattcattcattcatgcatgcatttatgcactattgactatttatgcactcattcactcattcatgcattttaaaagaatcggtgtttttgtatgatacagtcttgatttagggactatgaatattctgaatttatatatcttagatatttcttcaaagaaactcattgcatttttttcaygatcatgaaaaagaaattaagacattaagaaaaccaagctggattgtccaagtgtgggccatagcagtgtctatgggcagcacctgaagctaattcaggagtgaatctagtttgttcaagtgcttgaacaagaacttggctgaagccctggaggagatgcctggggcatagagtggggacgaggaaaaaccatagcactcttagagagtactgtaaggactagtatccacatctctaccacctgatgtctttacatttggttcagtcaagagagagggggcaaattattctgcttctcattctgccatcttcctgatttcagttctcacgctttaaattcttttttattgcgatctttttcttamtagtttaaccagtattttcccgcgctttcttcaccaaattcgtttctttccatcagcttgcggagttatattttttgatcgaactgctggggttacaagtaatttgaaatgaggaaagtgtctagcaacttccctcagtccagtaccctgtaacagagacttcagagtacgtagtgatgacacctgccctcctccccttctatagagagtttagtgggcaacttttttggcttgttctcttgttcttttcttgcagccccaagacttaggactcagacttggtttctgcttgtatggctctccatctcttcccttggaagagttctttcccgggggctttttaggtccaagagcatttggacccctgggagatgaacttgtagattctacaaagaacatccaagtaccaggcaaaccacatcttcctgtagcttaaacgttagtcttttttcccccttcaattttactgaagaataatttagtctccaacaaacaagcaaacagaaccctagggtctttctcaaaggtgcattcttgctgctttgaagattatcatcattaatttctatttcagctaattggttttcctttacatttttatttgggtataaatgtgatactttggtatacattaatgttgatctatattaatacgtcaatttataattgagtgatttaaaaataatgatgcactatgacctagtttatatctgccttccacttaatgcatttcctaagcaattatgcttttgtggctgactgaattcccttataattccctgttgggaaacaaagatttttttttaaattgaagaagtggtcttgttaaccaggggcaccrtacttaacttgagagaaaaagattaggaatgacakgaatgacagcatactcctaatatctaacagcctgccatacatgtgaaagcaggacacatagcagggaagcataacgttgagttgactcaaaacaccaaatgtatttgatacattattttctgaattcttacaacttcagcccttttaaaggtctttggatttttagaagctataagggcagtttttggtaaaggtggccctacttctaattcagttacagagtcagtggaatgatttttatattcaaatgctacaggggaatttattgagaggaaaaagggtactcaaactttcctggatgcctcaattaaaaatctggatcaataaaatttcctcaagtgtcccaaatttaaggaaagcaaacagcatcttatttaattacattcttaattagtattcactatagacacaattcaaatcagtaacttggcattagatgaatcagatttattgccatattatataactctcatgtttactttgttgtgtttgggacttctccctccccataataaagaatatgactcacaggtgtcacaccttgattcctgagaaattaatgttatagaaaagttgtttggaaagatataattgtgattttgttattgtttttgttgtcattattttcttttatggggatgggcacacacttcttgagatttaccagatttaccttgtagttcataaattatttctttagatgtatctaatttgctgtttagtttgtttcttgtaaaaaaattcagtgaatatatttttaaaaacatttttatggttctcttccaggtttgtgtgtatatttttttcgtgtgtggcttttcaattttatttctgtttcttttgtgtctgttttaagtatacctatctagttttttccacattgctctgtagtttcacattcttagattcctaatttgttgttgtggctactctctactgtgttttgtttctttatgtagcttataattttttttttctttttgagatggagttgtgctctgttgcccaggctggagtgcagtggcacgatcttggcttactgcaatctctgcctcctgggttcaggcgattctcctgcctcagcctcccgaatagctgggatcacaggtgcccaccaccatgcccagctaacttttgtatttttagtagaaaaggggtttcgccatgttagccaggctggcctcaaactcctgacctcaagtgatctgcctgcctgagcctcccaatgtgctgggattacaggcatgagccaccgcacctcgcctgtagtttataacttttggtggatttctctcttagaaccctttgtactctgtggagcaattttgcattcccctggagtctagggatttcaaacctctaggtcagtctttattttattttatttttttgtcttgaggtttccataccacagatgcagtaaacatttagaatttacatcctgcaaggctgaagttttgatttatctcactcaagaaattattttcttttattctcttcccaaaggctccatcataggacaggcttctttgctgaatctgatggtgggccgagtttttctatcccccctccaataaatgtgacaaactttttagactccttcctctgtggattgcctcttgcttttgcttcctgcccatcgccataaaagaagataatgacaacaaaacrataacaacacaaatgtaaacgtaccttttcctcttaacttttccatatcatcaatttctcatgaattaaggtgtgatacctgaaagtcacatttgccttatcagttatattcatatagttcctttgtcttattgatgtatctctcatattatccctcatatccacttctccaggcctttttccaccccatgtcagtctagattctcttggcttctcacttggagcgtcacagcagcctttaagttgccacttaactccacttcttgttcatcttgtttgtcagaaatctgaagtagatgtgttgttgcaatgatatcacatgtgccattctttgttttgggggttttaaggcttttaaggttatcaaaatattgtaataaccaattgtcttaattgtattttgtacttattctcctgcttttgccaacttaaaatgtcttaacatcctgttaatactgaatgctgatgctttcctattcccttttctttcacatgtccgtctataattgtttattgattatatcagtctctcaacactaaaggcaccagtcacaactttgatgttatacagaatgacaactaaaaggtgacaaatgctaatgacttaatcgaggagttgttcatttttacaagcttacctgagttcagagaattggtaaaagactggtgacttttggctactatctaaatataattggttaatgtagctcctggagatcagtggttagtataatactcttagttgagcagggttaaaaataattacatttgtttaagttgcagatactactctactgtacagcaaagaatgttaaaatgttttaattcagtatatgaagagcaaaatataaaaacaggttttcttccactctcactagcaagcaaagtggtctgtatttttgaaatatattttttgtttaatcataacaaaatataatacaaatgttattaaaagccctattttatggatgaagacagtgatatttagagatattaattagcttttccaagatcatacatttatccagtagtaaaagcaagttttcacaagctgatctattttattccagtctttatttggaatcactaaacttacattccctttagcaaaactatcgtttacatttctagkgtttcaagagttcaatgctaaacttgggagatctattcttaaattctctcaaagtgcaacacattttcctcaggatgatcataaagtcatcagatgtgtgttaagcaatatatatagtcatatactcttgatcaaaaaagrtttccaggttacacagaagagagatttatggctgagaaaaaggcagattgcttctaagaaaggcttcaaatatattctcttctgacaggctacaggagagccagctagatgaaccattacagtgtgtacaaaatgctcagcagaataatttctcagtactggtagggaagagcaataggagtaacacaagagaaggaaagttggtctgcagagtctgccttagtatccgtaggggtgatgaggttgcttgggctaagaattctttcacatgtctccctgggacaattcactcagaattacttctgtgttttctaggctatctaggcaaccatcaccaattagcaaacacagacaaaatagaacaccttgtttggacctgcttgtcaaaaatcaaatgatcataatttataattccaggaagacttgccatcaaatgaacttatgacaratgacccaaatgattctcacaaagtagagcttgttgtaacttttagcatgagaagtatgaaccccattaycattttttaaacattttgagttaaatggaccgttttgcaaagtccatgttctatctttatagacagctcaaaaatagctcagcatctagtttgtaggttggctccatttaaggagcttgaagtcaggcaaggtgctcattrctattcatccagatctgtttcttggacacctcagctgtttttcttttctacggccagggaggagagtcatgtgchtagtccaagaatgtgcatctccatgtctctgaacagttggccatagaattggagctaggtgttctttgtgccattggctttcctctctggcatgcttcccgggtggttggagccagccagtgcctgatccagcttcacagacccagtaatgaaatttggagggcagagtaggtaactaggtacacaagaattgtaaagcaatgcccatctggacagttgatcacaactataacttctcaataatgtaacaggaatataaactgttagacttcctataccattgcaatataaagaagataattgaaggccgtgaagatagctcatgaaatgcaaggaagaattggacaactaagcaacaggaagagcagagaaacagtgagactttgggagtcacaagatctgggtgcttaaattctgccaggactttcttgccatcttcatttttgctcctctttctcggtcagttctcttctgtctttccctacagaccagcttttttccacatggatatgaaacgtttccaagttttatatcctaggggttttgccactgaaggaggactagcctgatattttcccagactcatatcctaaggaagatgaatcattagatccaagtaatttcgtgcaactggagaagacttgcagaccctacctaatgggttaagctggatatgcatctgtgggagggagatatgttttgtgggtataatacacatgcaagcaaaccttaatattgtacaagataygcttctgaaaatttacttgcagtttgaaaatctggaagccaaacagtagaccaactgttgtgagtgttagaatttagtgtaatggcactttctgtgacccaggcaactctgcataggcagaaagattcttgaaagccccacccaggttggaaagggtctgtgtcagaggtcatgagtgggactcttcaggcacctgtttccccatcccaaggtctgcacatggactggaacaaaagttttggcagctgcaatttttaaatcttttcccaagggtatctagggatttaaagcagtagggaatgtactcccccactttcccttgttttccttttcactgcagcaagaggcaagtatagccctcagccctgcttgtaccctcacaggagactcatgtacaggtcccgggctctggctgcaggacagtgtgaggctgctgacagggcgagagaatggcgagaacaatggaacaggactgagggagaaggaagaggaatcgtccccagaactactacttgggacggtggtcccagggagcaaaaaacacccctggagccccttcaaggggccttttggcagagcggtactaccgctagacactgccatggctgcaggtaggactgattaaagaatttctgatttcttctgaggacagggtaaagctctgaattgtttttagagactgcattcagatctatatttcggaaccatcactctggttgcactgtgaacggtaacgtccagggagcaggactggagggaaggagaccattacgtggctgttgctcctgcccaagcagggaacaatgatggcggaacgcctgtactggcagagaggagagagaggagggatttggcgaacttttggaggtattggtaggacttggtaatatattgaatgtggagagcaaatgggcagggagtcagtgacaaagcctaggtgtttggctttgatgactggctatgcctgtgccggttgtgtacagaatccagaggtttagcgtttccatgtgcagcgtcggtcctcattccgcggcagcctggtgtggagttgagatgtgccccctccactccatgttcacgtttctttagccagagcaaagcatgcctggacaacctaggtttctttctttctttctttcttttctctagagagagagggtctccgctctgtcacctagaagaagtgcagtgtcgtgatcatagctcactgcagccttgaactcctggcctcaagtgatcagaggattaggtgtacttctctacaaacttctcaaacctccttcagcatctcattccttaagggaccttacagtctctcccacctggacggcgccatggtgcctcattccatttctgagaattgtcttaaaactttatatagaaacttgctattatgtatttaaatgagaagaaatgttgaatttgtaattctaattttctaagacaagagtttgtagctcgcttctagcagagttaaagaaaaagatatgatgaatggtctatatattgaaaactgcagaagaaataatctaatatggaatgggtgaggttgctacaggtggtgcaaaaataattgcggtttttgctattactttcagtggcaaaaaccgcaattgtttttgcacaaacctaataatactgtttgaaattcatattttctggtggaacagtcttgagatagagcgggaactagattattggctcataaaacagcatgcagttactgttattccttaatcttatatctttattatgaggtaatgcttctcttacttgatttggagaatgttctcatctttttctcatatatttgtgaaaactaaatgttaaaggaattaacataacaaccattgctaaattatgatgtaaaataatactgtgtctgcaattagcctaggtagttttacttggttcaataatataaaatcactaggctcataatattttagtaccttagtgtgattggccaagaaaaaaattcacgttaccataaaaagtcaaaccaagtaacaattaatctaaatttcaaggaaatataaagcaaagtattatgttgtaacatggaacattaatgtaaataactccccaactgttcatgaaatagattctgaactggcagttgacaaagaaaggctagttttggcttaattctcttatgctccaatatctttcctgaagtcttatttaatttcacttgcgttagcaacagtactctgagatggtggtgcatctggaaaattatcacttctttcctgacaatcagtatctttaatttaattcttacatatgctttctggaaatattacattcatactttgatgacgtcttaaaaataatttcaatgtaataattatacatgtgtggtgagtaaattgtgttccgtaaaagatacttttaaatcctaatgtctgtatttgggaatgtgacctcatttggaaacagggtctttgcaggtatgatcaagttaaaatgagattttactggattaggatgggtcctaatacaatgactgttgtacttaagaggaaaatttgtacagagacatacacacacacaaaagaatgccatgtaacgttaggcacggagaacatcatgtgacaatgaaggcagagattggagtgatgcatctatgagccaaggatggccagcaacccccagaagctggggagagacaaaggatgcttccctaggatctccagagcaagcataaatctgccagcaccttgatttaggacttctttcctccagaactgtgagaatagatttcagttctaagccacccagtttgtggtactttgttataggagtcctaggaaactaatgcaacatgctatgttgtaaataaacagtagttctaattggtataaataataattttaagtatattttattattaggtcaggtgrgtaggaaattgcctggtagactaattatcaatgttgtattttctgaaaagttaaaatattcccattcagtaaataatacttgtctaaaagtttctatctgtattgtcctaaaacaaagcaaaaattaaaatggagtcagttatgtacctgaaaaatgtgaaaaaggaaagaaaaatcttttaggaaagatttttcctaaaatggctatacatttgagaaagaattttaaaacttaaatcatctggctgtttattccatttttttgtttacattatcagatacattatgtatgatttcatacattatgtatgttacattcaatcaatatttattaaatacctaaaatttgctaggccttgagctaggtattgtagataggtaaataagacaaacattcccttcccctaaagagattattttggcatgaaatttaatctgtagaagaagtgaaagaggccatttgcagagtctaccatgaaaattcattttcactatctgctgtagttttacctgatcctgtgaaaccattttagcatcatttggttttactttgtgcttctgtattatattggagaaaataaaatttacttattgcacagacaacataaaattaattaaagtatgtgaaaccaaaaatgtaattgtttatcaaattttttttagtgtttcccattcatcagtatccaaatacattcttagttgtgcatccatgttagcataactaaaatgtggtgttcttattttttcatctaattcacaatcaacaatgttcacttttccactttttttttttgagacagagtctcactctgtcacacccaggctggagtgcagtggcatgatcttggcacactgcaacctccgcctcctgggttcaagcgattctcctgcctcagcctcctgagtaattgggattacaggcgcccgccaccatgcccggctaattttttgtattttagtagagacagggtttcaccatgttggtcaggctggtctcgaactcctgacctcaggtgatccgcccacctcggcctcccaaagtgctgggattacaggcatgaaccaccacgcctggcccctcatcatttttataattacttttttgatcattaaattatattatacaactgaccatgatttgtttaattaatccactgcaaagatgaggctgtttctagttttcattgtcatgaattattctgtagtttatattttacgagtttttttggggaaaggttacttcttaggaaagttaatactgggtaaaagggcttaaacatatttatagcttttaaagtacagagatggattgctttctaaaaatattagaaaatgacattgttactagcaaatggttgaggacaccgtgttcacagtgtttctgatattaagtattatcaatatataaatagtttgggcattgaatatgtatacaataatccaaaaaacatgtacttattgctcagatttatgtatttcagtaactgaaagtgaacgcttttccatatattagtttattatttacattttcttataataaattatgttctcctactctttcctaatcatttagtgggcatttaaacttcgcctcactaatttttatgtcctcagtaagtgtatatatagtcacatttatttactaaagatattttccataatctgktgtatccttttacttttggggctgtttttctttattcagaaatgcaaaggttttgctttgttttgtttatgtaggcaatgaattgtatggtctctttgcaatccaatgcagtatttttgccatttatgtaatccatgtatctatcagagtaagaaggaacatcagattttcctyggaaagagagcacttggctaatttgttatcaaggtaatgaggagaaaatggctctaaaggagaaggccagccacagttcagtctgggagaatagagggattgacatgaggtgggcaggtgtcaagtcttgggcagctctgtgcctgctgaccagtggccagcacttaactatttgcgtgcatcatttccaaggtgaacctgagccagagtggtcttggttacttgggccaggggacagttcacaggaccaaggatcaatgggtcagctaggaaaggataagcaagaaagggattagcaggaatcaggaccaggctgagatacccagatttgaggggaggaaccagtgcatcaggaggagaagagggagagtgggaggaggaaggtgggcgtgtgagctaagaggcaaaaagctgggcttttccatcacggtttcttagcctccacaccccatgctgtcccaacacaaaaacaccaccgtaaatctagaactctctgcctacttatactcctgaattcaaatgtgtactgctggctgggcatggtggctcatgcgtgtaatcccagcactttgagaggctgaggcaggcagatcacctgaggccaggggttcgagagcagcctggccaacatggtgagaccctgtctctactaaaaatgcaaaaattagccaggcgtggtggcacgctcctgtagtcccagctacttgggaggctgagtcacaacagtcacttgaacccacgaggcagaggtcrcagtgagctgagattatgccactgcactacaacctgggcgacagagcaggacttcatctcaaagacacaaaacaaacaaaaaaaccgaatgtgtactgcatcaactttcagtgtgcttgataatccaccatatcctatataccctcccttcccttttcatatgcagtttaaaattgtgcttttcttcgaaatgatgctttcctagttttggagtattttaaatcaatatctcactgaaactgtcacattatatacatgtgttattattattttctgacttttaagaatgaaaaaaacatacctttgatctgtgtctctgtttatatatgcataaaacttttgcaatttacattttaaatttctcttgtaatttttaaaacgtcttgtgatctaataaggaaagtaacatgtactttggaaaatattgcaaagcataaaagaaattgaagaaattaagaccatgcctacttggatgcagtagggaatatatgactggatatatgtaaaactgagcaaaacatctactgatattgaatattcaataaactgaattggcatctgtattagggttctctagagggacagaactaataggatatatatatatatgggagtttattaagtattaacttacacttattattaacttaacttacccttaacaatcacagggtcctccaataggctgtctgcaagctgaggagcaaggagagccagtgcgagtcccaaaactgaagcacttggagcctgatgttcaaggacaggaagtatccagcatgggagaaagatataggctgggaggctaggccagtctctctttttcacatttttctacctgctttatattcactggcagcggattagattgtacccaccagattaagggtggatctgccttcttcagcccactgactcaaatgttaatctgttttggcaacaccctcacagacacacccagggtcaatactttgtatccttcaatccaatcaagttgacattcagtattaaccatcacaagtccaccccttgtcaacttgaacccatatacatctcctgagattatacatcatcttcaaataaagacaataataaggtcataattatacctaacataatacagctgtcctttgtataaccggaaatgcaccaatccccaacccaaatactattacataaagttaacaatatttaaatgcygatatgaagtcaataaatcttatgtcacatgataaaggaaaaggaaataaagrtattttcttagtacaagtgtatacatgcacaaacatgtttttaacaaaagaaggaggaaatactcatgacaattacagtccccgtttctgcagtggtctcgtggtcgtagatgctattgatgactaacttcttctactacccattctgtattccctttgccttcagcaagcacctcaacaggtcatgtttttttttccttgtggagtgacccaaaccttcattcctgggggatctgggccatttctagtcctgcctggattgggctgttgtagtttcccattgaccttaatcatagggcgtggtaatactaagagacaccctaatggatctcctgtattccatgcatactcttccttacctccgttgtggagtaatagactgatttcatcttgaaagtctgggtcagtcagtcaccccagccaacaatgtaactcccctcttagcctgttgacttaaaggtaggaggagcccaaagtgtccaggtggcaatgttaacatccagtttaatggaatcgttgttgtctctcctggtggcagtgttcctccctctggaactaagacctctaggccagcagaaggtaatgtcgtgggaacattttgctagtggaaggaaaaattttgctagtgaatcactaggggtgatggtgagtggtgccacttccacttccacccttgattcgtgaacccgtgaatcctggctatgggagagacagtgccatatattggatgctgattcagagcrtacatggctttctagagaactttgccccagccctgcaaagtattgtcacctagttggcattgtaattgtgacttmaaaaggccattccaccattctgtcaatccagctgcttcaggatgatggggtacatggtgagaccagtgaattctgtgagcatgagcccattgtcgcacttctttatccataaagtgagtgcctcggtcagaggcaatgctgtgtggaataccaagacagtggaaaaggcattccgtgagtccgtggatggtagtcttggcagaagcattgcgtgcagaataggcagacccatatccacagtaagtgtctattccagtgaggacaaacctcttccctttcyatgatggaagaggtccaatataatcaacctgccaccaggtagctggctgatcaccccgaggaatggtgccacatcgagggctcagtgttgctctctgctgctggcaaattgggcactcagcagtggccgtagccagtttagccttggaggatggaagtccatgttgctgagcccatgtgtaacctccatccctgccaccatggccactttgttcatgggcccattgggcaatgacaggggtggctggggaaagaggctgagtggtgtccacagaatgggtcatcctatccacttgattattgaaatcctcctctgctgaagtaacccatttgtgagcactcatatggaatacaaataccttcctggtttttgatcactcagagaggtctattcacatatcttttccccagatttctttgtcaccagttttccaatcccgcttcttccaaatctctgaccatccagccaaaaaccattggctacagcccatgaatcagtatataatcacacatctgggcatttctccttcatgcaaagtgcacaacgaggtgcactgctcaaagttctgccaactgggaagatttcccttcagcgctgtccttcagagatgtcccagaaaggggctgtagtgctgcagctgtccactttagaggggtgcctccatatcatgcagaaccatttgtgaatcaggccctagtcttctcttcctctgtcaactgatcatagggaactcccratgagggcatcgatgcagccttggggagagaaggtagggtggcaggagtagaraccatggacatttgagccacttcctcatgaacttacttgtgccttcaggacctgctcaaacctgatcacatatatgctactttcatttgatgatagaatgctgctctgtacgaccttctttatggccagatgggtcagaaagctcccagttcatgatagccagttaaggttgcatagtgacttgatgactcgtagtcaaaccttcagtttccaccaaagcccagtaatgggccaagagctgtctctcaaaaggaaggtagttatctgtagaagatggttgggccttgctccaaaatcctagaggcctttgctgtcattcacctatgggggcctggcaaaggctccaaacagcatccctatctgctactggcacctcaagcaccattggatctgctggatcatatggcccaagtggcagaacagcttgcacagcagcctggacctgttgcagagccttctcctgttctggaccccaggcagttttatttggtaaagtgaatgattaaaggtcttggggccaaaatgatctcaacctattttcaaactttaaatgggttagaagcctggctcgctggcatagagctaggcgtggaatatgagtccctagtgggccacttttggtaagcagaactggcactgtgggaggagccaaacgctgggttaaggcacccgatgctgatgctcattagacaccccactcttgktaccaaaatctgtattagggttctctatagggacagaactaataggagatatatatatgtatatatatatatatatataaagggaagtttattaaatattaactcacatgttcacaaggtttcacaataggctgcttgcaagctgaggagcaaggagagccagtccgattccccaractgaagcacttggagtccagtgtttgagggcaggaggcatctagcacgggagaaagatgtaggctgggaagctaggcccgtctctttttttcacacttttctgcctgctttatattcgctggcagctgattagattgtgcctgccagattaagggtggatctgccttcttcagcccactgactcaaaatgttaatctcctttggcaacaccctcacagacatacccaggatcaatactttgtatccttcaatccaatcaagttgacactcagtattaaccaccacagtgtcygattgtttctttagattgtaatactcttttccatttaaattgtattttcagaaatatttaatgtcagtagatatttcttgaaatgtgacttcaatgattatgttcatctatgatgaacaactttttaaatctaaattgtttttattataatcttttaatttttcttttttagaattagaatttgaacactagaaatgtaccattgcaattttaaattacatttcattgtgaatttgaacacagttttatgataattgaacatatttctgtagggcatgtgcctttctgtttgaattgtaagagctctttatatgttaagaacatcagcccattgtgtttggtatttgcacaggtatttctagatttttctgtgccttttaattttcattgtgtgtgtgtgggtgtgtgtgtgtgcgtgtatgtgttttaaaagagagagcaagagagaggattcagggttacttgggtttttggtgtgtcttctattgctactatgataaaatcctctatctggggatttaaaaatatatgcctatttttcttagagtttttcaactttaattcatttgaaaatattttaatgtatggtatggagtaaagatattttttgaatagttaaccagttatctcaccatagtgtattactaattatctttcccatgtttatttgtaatacattctttaacatattgtctttttaaggttggtcatgtattttatatttttaaaaagtgaagagtaattatttttcagaagaataatcatctgataattcaaattttcctgtaagagaaagttgtcatattaaaatgcacacttactttttcaaattattttatgtacttttgaaagtaaatggttaattcaaactcttgattgttaatctgtcaattgcttgatgacatacctccctcagtaaaatagtrtattaactgtttattgcagactgtgtttagtgcagactatggatatttttgttgatctgtagaattcctgactagctgttcacataccccacttttaccatgacactattttnaagatcattaattgcatcagatatggagacaatattagtggattttcttcttgagagaatgctcctacaagttactaattaccatgctatgtcttgatatgtttttgtaaccttacaaatgaatataaagataacatttttcccctttgtttccatcttcttgttttagatagtcatttttacttgaaggaagctgcttctacttgggagtggcaggagaagtgagaaaaccacatggaagactcccaggatttaaatgaacaatcagtaagtcttcattctcagttttgctgaaaaaagttgcgataacactactgaaaatcatacgtaaaagagatatattgtaagaagtaagtttttcattaaatatatttttaartgatttttgaatttcctttcaaagaccatgaaacagacctttggagatttatgccgtttctgcttaatgatgatgtcacattttgatgtcttctttgattttctacttggaaaactagtggtggaaagactaaggcattgaaatcatgatgcatgttttagacagtctaaacaattttatatacgtcctttattattttatttcagatatgctggatattgttgaatatcagaagtataaaaggagaaagtatattattagcatgcttgttagtcattttaaggaggaaagaaaccatagttctcaagcgcttttagtattttactagattcattgcaggaccaagaatgcaccagcttgatggcaatccttttaagattctgatttcccaagggaaaggctctttgcaacctttcctcctagcttgttagtggtgtctctgtgacagtagttctttagygtgtggaactagaggcagtgggagggcttccctcacacccccacgccttcacactactggaagctgtcgtttgagctgttttgcatacggacaactcatgatgttacaagtaacaagacgtgtgcttactgagagtgtgttctgcagtctgatgctgttccttttttttttttttgatgctgttctttattagcttatgtgatcatgacttgatcttacagtcaaatgtttctccatcaggcaactgaggagaagatacttatatctaataatgtggttctagaaaaggtatatgtgatgagtttaattttaagagggatgtatattctggtgccatttgaagttgatttgatttgctttctagtggatattttatttaaaagaaatgatagccatgcctttaatttggatagacatgaccatagtctaatttcaatatatattatattatgatttatttcacatggcatcataggaaaaatgtaacaaaaaattataaagtgaaaaaactatgaaatttgtcaaatggtagagatatattcctctagaattgtgtgacttctttagtaaggtaaacagaaatggctatgggaaggcaagggctttcaaacttttaaaaatgctggttattgactgtaaatattcacagcatggactctagcaaaatggaggttagtcatcatgactgttggaatcagaagtctgtctgtgtgactatggtggacttgaatagttagtagtaaatgttgacaacatcttagtggtgatgcttcattaaaagagtgctgttgatctgaactttgttctgatacaccgagggtcacatacaagtgtgtgtgtatatgcaaatgtttgtatgtatgtgtgcgtatatgttagagtgaccaacgtttttttgttgccagagactgaggattttctagggacatagaactttcagtgctaaagcacacaaagtttgggggaaaaccaggatggttgattctgttaattactatagggtgtgtatatactcaagaaagaattttgttttcaatgcagttgagaatatatttttatgtttaacactaaagtgatgtgttactaaagatgcgtcatatcaccgttcacaaaatgaagcacagaacttgtaaatcagatatggtgtccttctagtgatattttaaggtcatggagctcactatttctttttaaagtatgtttttaaaagtttccagtgatgctagtgagcagtcaggtttgagaacaagaaatctagggagacctgcctaccctctcagcttgaacccatttgctgaatttaaatttcaaacatgtagaccaatgtattcatctcataaatgtgcaaagagatgcttagaactgttaaatgacttgcccatgttggcatagctgataagaggcagagttaggacttcacacggttcttctgactccaagtccaaagctctctccataacatcgacgtgcctcattgcctttgggttatgcatattgtggcatttatagaaatgtcaaaaaaaaaaaaaaaagaaaagaaaaagaatcagcccctttacatggaaataatttctctttgaatgaaatctttatatgattctaaattttgtggagtatattaatgtctcaaaatattttgaaaaatgatagcatttattaagatatagaacaagtaggggtggaattaaaataaagttcatagttagatgaaagtraatttactcatatcattgctattttagttcaagagggattctttgggtgtagacatagcagtaggagtcatttgtggcacatgcacactgcatctagcattttccatatacttgctccaattcttaccatgtattccttcattgcaatttttaaggccactattttayagatgaaactgtgacctagagagtgtcaaggtcaaacagctgttaagtagtagagatcagaattaaaccaacttctctctggccccaaaacttttaatggattttgcatgatacaacataataggtagttaagggcatgagctataaatcagacttccctgtcacttaaatgctttaaaacctttgggaaattacttaaactcttcctcctctatggagtggaaggataataaaaagatgtcttatgaagtgcttgcatatgcctcacttagagtaaatattcaataaatgttagctgctatcacaaatacctgagatattcagatgctctttaatgagtattcattcattctagcatatccagctactgaccagacatcccttctgggagttcacaggtccacacactcagcaaatgaagaataaattcaccagctctccttccctctcccagcttttcttcctttgtcctttatgccagtattactcatctcagtgaatggcatcatcagctactgaatgggttatggcagaaaagaggtagtaatcctccttttcttcatcccgcatctcaaagctttgtccactcttaatgtttaatgtcattcaaagctattctttttgctcgagctcccttagtttagttgagatctttattttatctcttgactttcttgttttactttaagttgcttctagagttgtcttcctaaaatacaaccctgatcacatcactaccttcctttttatccttcacaagccctttcttgccttcaagggagaggctcaagtgtgtcatcaagcatacagagcttaatgcttatgtatttcttcagtttttttttttctggtttctgtcagtttctgaatctcccaggttctctgaggtctctatgcatttgcaagtgctttaatatcttcccagaagggtctctttcccaccaccaggataacctgtaattcttgaagactcagtttaggtttccatccctctgagcagccctctcagactacctcctttcttctcacccaatcagccctaccggtcagggccctctgcagtgtgctgccataaccctttggcatttacctctagcccagcacttaccctacaggactgaaaccctatctgtttacttgcctatctcaccactacattataaactacttaagagtaatggtggatctcgttcatctcgtactcttacttcttagcacgattcttgccagtgttcagtaaatgttttcttcaaaagcctttatatacttttagtgaggtatgttaatgagtagcctgacaaattttagaaagccaaaatgttattctcagagtagattactgactcatgaatttatattcgactcacttaaaaaattgcatagaaggtctaacatgaatttaactgcatatgaccaaaataaagttcagtccttcatttttcctctagtatatctggctcctatttggcattctggcttagaggatgtagagaattttaagagataagcaactaaaaagaatatttaactgtcataaatttatctgcagttctattttagagcttcataattctttagaattggtttaagttatagccagttacagcttattacagtttttaatgaaatgttcttgataatagaaatggctgtgaatgtaggttatacctagcaatagctcccttcatactgtgaaatatattgtatttttgtattcaagcagagaatgagcaatatttattatttttatagcttctataatatctttatagattgaggtgttttataatcctattttggtggtccgggatattacttcagattttttctcatccaaaacattcatatcaacatgagatggagtytggcctaaattaatgatcaagccagcaggtttgaaaagaaatatattttattaatgttaagtattgtatgttataaagtaaaacattcgtgaatattaagtaaaactaagtaaaatgaataagttacagyaggattgctttccctaaatgttatgcattacgggcctgaacattcatatgtatttccacattgttactaaatcaattcacttatattgttggtggcatgattttattagtgacatctaaattaactcacattcattggattatgttacatattgtatgattcattaatacttctggaaattcatttctgtgtccatttttaaatataatacatttatatttcaaagctattctatttgtatttatgaaacatattcatagacatgtttcagtaatacttttggaaatttgtttctacatgcatttgtagatatgaattgtatttatttgccttcaccaaccatgctaatttaataatgtctattaaaattctagagctagtttagtaaattaatttatttttatctctctcttgtttttccttagagtactcatgactttgattagtcctcagatctttgttcctagagatcctacagtattatctttgattatagccactagcccatctttaaaacgtgtactcctctctgtatcagatttttaactattgtatagaattgaatttgccattaaacttatcatctagacatagaacttcagaaccaccaatttatgacagtgtttaaacagtatgctagaatataattattttgattaatttttgtttaaatcatttttctatttttataatgtgacattatcaaaatcctaaaattctattattctgttgctttattcttgggtactctaaacccattcgaccagaaggcatacttgtactgaatatcttaaatatattttacttagatctaaacaatgttggattattctttttcaggatccaattctgtatcgaagaacttgacctttaaactagttaaaagaatcttgtttacaacatgtaatttttatactatccaactgaataacatacttcagagttctgtggaattctgttcaaagcccagtttcagaattactgttaactccaaattgccaattacagcttgactttgcagttatgtagtagagtacctaaactgaagttacaaagtagatgcgttcagtataatttaatgtttcataatcattaaggcttactcttcctttttaagcatttttaaaataatagtttttcttttttctttttttttgtttgagatggagtcttgctctgttgagtacggtggtacaatctcggctcactgcaacctccgactcccgggttcaagtgattctcctgcctcagcctcctgagtagctgggactacaggcatgtgccacggcgcccagataattttttgtatttttagtagagatggagtttcaccctgttagccaggatggtctcaatctcctgacctcatgatctgcctcgttggcctcccaaagtgctgggattacaggtgtgagccaccgcgcccggccaatagtagttttattgagatgtcattctcatacaatacagctcacccacttaaaatgtacaattcagtgatttctagggtattcatagagttgtacaattattaccacagtcaattttagaggatttttaatcagttgagaaagagatcccatgcccattagcacactccccattcccccgatgagcacccctcagccctagacaagcaccaatccacttcctatctctatggatttgcctattctggacctttcatataaattgagtcatacaatatgagaacttttgtggcttgctttttatacgtgacataatgtttgcaaggttcatctatgttgtagcatgaatcagtacttagttcctttttatggccaaataatattccattgtatggagacacttctatttatactctttaaatagaaagaatataaatttgcccctatgttataaggttacttctttttttacaattatgttttaagagtcatttctgtattctagataaaagtccttcaccagatctacacttttcaaaggatatctcccattttgtgggttgtcttttcactcttgatagtgtcctttgatgcacagaagttttaaatttgagtccagtttatctatttttttcttttgtcacttgcgcttttagtgttgtgtataagaaatctttgcctaayccagggtcacaaagatttactcctatgatttcatttctctatgatttctcatatgtaagygagaacatgtgatatttgactttctatatctgagttgcttcagttaagataatggccttcacaaatacttactcctatgatttcttatatgaattttacagttttctatagttttagctcttacatttaggtctttagttcattttgagttaaattttattgaggaagatttttttttaaacttcaacttaktttagatttcaggggtacgtgtgcaggtttttgtcatgggtatattgtgtgacactgaggtttggggtatgattgatgccagcacctaggtagtgagaataatacccaactggtagttgttcagcccttgttcctcttcctccctgccacttccggtagttcccactgtctattgtttctgtctctatgtccatgtttcctcactgcttagctctcacatctaagtgagaacatgtggtatttgttttttttttcctgtgttgattcacttaggatgatggcctccagctgcatccatatggctgcaaaggagatgatttcattttttttatggctgtatagtatcccatggtgtatataaaccacattttctttatccattccattgttgtgggcacctaagttggttccttgtctttgctattgtgaataatgtctttctgatagaatggtttcttttcctttgggtctataaccagtagtaggattgctgggtcaaatggtagttctgtttaaagttctttgagaaatctccaacctgcttcatagtggctgaactaatttacattcccaccagcagtatataagtgtttcctttttttctgcagccttgccaacatctgttatgttttgacttgttaataatagccattctgactggtgtgagatggtatttcattgtggttctgatttgcacttctctgatcattagtgatgttaagcatttgttcatgtttgttggccgcttgtatgtcctcttttgagaaatgtctgttcatatccttttcctacttctaagtattttttaaactctgaatttttatatttttgtgtgagtttatgaagattcagcacaagatttcattaattattatcttctatgaacttctaaaattataatttgatttgttaaaattttttctcaaatcttagaatatatatgacacatatgtgtgtgtatatatatatatgtatatatggagagcctcatattatacagaatatggagtgtgattctatgtcatttgccaagatctggagactaaatattacgttttcttctgtcaactgtgatcagctggtaacagctgtttgtgttaagaaggaacctatggctacatccgagctcattggaaaagtaatgttatcaatttggtgtgatttgccatggacttggtaaggaagaagggtagcaccaagcctcataactgctaattctggtctggtgagttgtcaagatccctgggcagttggtttggatagtatagatataaataagagctatgatatctttgggtaccaaaagtcttgtgtctgaacttacaatttacatattgttatctaataattctatcttataaattaaaatgaaaataattcaggctgggtgcagtggctcactcctgtaatcccagcactttgggaggctgaggcgggtggatcacctgaggtcaggagttcgagaccagcctggccaacatggtgaaaccctgtatctactaaaaatacaaaaattagccgggcatggtgatgcatgcctgtagtcccagctacttagaaggctgaggcatgagaattgcttgaacccgggaagcggaggttgcagtgagccgagattgtgccactgtgctccaccctgagcgacagagcaagattctgtctcaataataataataataatataaaaaataaaatgaaaataatttttatgatagaaatataatctctttcatggtttaatactcttgagaaatagaaaacattaataaatataatgcaatttctgctataaggtatttaacaaatggaaaaattcactgatgaaaaaagttaatgttcatcgatagaggtaccatgccaagtgctttatgctactcatctcactaaatctcataacggccctttgtggaggctctgtcataacctcagtctgaagaagagtacactgaagcagagtttaggtatcttattcagggttgtgccagcttggaagctatgctgatggaatatgaactcacatagtctttattccagaatccatactgtttttttaaatatgtaagtttaaggggtacaagtgtggttttgttacgtggatatattgcatggtgatgaagtctgggctttcagtgtaaccatcatttgaatagtgtatattgtaaccattaagtaatttctcatccctcactccctcccacctgcccacccttctccagtggtctccaaaggtctccagtgactattattcctctctgtttccatatgtacatattatttagctcccatttataagtgaaaatatgtgatattggactttctgtgtctgagttgtttcacttaagataatggccttcagttccatccatgctactgctaaagacacgatttcatgttaaacacgtgaactcacctgcttccatcaacttacatgattttcagacccttcggtcaacttggtgtcatagagtatgtattaaaactcagcttgatcttagattatttatatgaagatcaaacaattttaaatattatggatttgagtgagaaatttaaattattccaccgtgattacagattaattgtacaatcttcattaatcacatatctcggctcactgcaacctctgcctcctgagttaagtgattctcctgtctcagccccccgagtagagtaactgggactacaggtgcacactaccacaacaggataatttttgtatttttagtggagatggggttttgcaacattggctaggctggttttgaactcctggcctcatgtgatccacctgccttgacctcccaaagtgctgggattacaggcatgagccaccgcacctgaccctattagtaaatattttaacaggcagtcataagatagcagaatgtatggaaattaaatgatagttcagcaaattcaattaagtaagcatttcaagacttcttgctatcctctagaaactttgctatactagggattaaaagatgaatataataattccttttctccccctaaattttagtttagcataagattatatgatactgtgtaagttctattcttagttcttttaaaacgagacttggatagctagtactaattcattcagtgaatatttgtggagcactgctatatttgaagcatggttttcattgttggaaatacttggtggacaaaatggacgcatattactgttcttgtggaacttatattcttgtggagggggagacaaacagtaaacaaatatagtatgtcagatagtaataagtgcaaggagaaaaaccaaataaagcagggaggaggataggaagtgcttgcgggcagggtaggtaggtgaagggacagctgtggttttttgtttttttttttgtttgtttgttttttgagatggagtctcactctgtcccccaagctggagtgcagtggcgcgagctcggctcactgcaagctccacctcccgggttcacgccattctcctgcctcagcctcccgagtagctgggactacaggcacccgccaccacgcccggctaattttttgtatttttagtagagacggggtttcaccatgttagcggggatggtctcaatctcctgaccttgtgatctgcctgcctcggcctcccaagctgcggtttttggagagtagttagggaggcctcactgagaagatgttgtgcaaagactcaagagaggcgaggaagtgagccatgtggatatctggggaaagtgggttttaattagagggaacagcaaccgtgaggtggtagcatgcagggtaggttcaaggaatagaaaggatgtcagcgttggtggtagtgatgggcagaacaaggcagaaataaggctgcaaaggtaatcagcatgggcatgtgagggtggaggaatacatattgtgtagaggtttccagaccattgtaaagcttaaactttttctcttagtgacatgtaaagcaattggaggcttttgagcttaggtattgtgtgatgtgactaaagtttttaaataacccactctggcttttattttgaaaatagactatgatgacaagagcagagactggctattttaactatccagatgaaaaatcaacaaagtagcattggaggtagtaagtcgttgcattggggttratctaagatgacttgctaatgtatgggttatggattatgatagaaagaaaggtgtcagacataacttcaaggtctttgtgcagagaaatgggaaggatggagttggcattgactgagataggatgactggggaagaacaggttggggttgcagatcaggaggtcagttttagacatggtggcagagacattgctgtgttttcaccaaccctctttcatacccctcttttctggtgcatctcagtttccttacagttcagcagggccatataactagtgctggcctgtgaaatgtaaggagaagtgataatgttgatcattttgagaatgaggcagtgagaagccccagaatgattctttggtctctgtgttctcctagggtgatgaaggaggaggaggcctcagggaaacaatggggatccccagttatgaagaaygctggattgctagtgcactgcatggggggcacattctgaggggagtgttaaccaactaagctaattaaacgcatgtgaaattttactttctcttaggcatatgcatcagatgtaaccattgggaactcagggaaatgagttgaacttgaaatataaatttgggaggcttcaagatatcaatggtatttcaaaacattatatttgttgaaatctccaaaagaataagtctagctagggacaaattaaaaggactaagccctgggcaccccaggttagagagcaaggagatgctagtttacatagatagctgcttgatcctaatacccataagcaatgagttatgtcatagactgtatgtggccacattcagtgaattttcctccgaggtgcttctttccaaatttccaaaaacacatatccaggtcactgattactggattcacctctatcatagcagaaagagcaccatacagctatgaataggtattgagacagtattcacttatttgagatttccatcaaagtaaccaaaatcatgaaatatttagaagaaaattcagtcaacaaatagttttcattttttcattgctttgtttgtagatgtgatgtttctaggcacttcaggttaggaaagaattaatctaattagagttttttaacctcagcattgttgacattttgggccacaaaattctttgtagtgttggggaggggtgctgtcctgtacattgtgttatttagcagcatctctggtatctacccactagatgtcagtagcaccccccttcctttgttgtgacaataaaaaatgtcttgagacattgccaaatgtcttctctgtgtgtgtcggggggaccacagatctacattacatctgtttccaatgagtgttttatttatatacttactgcctgcaaaacatttgagaaagtttacctgaacatttaatataatatatactatgctatgatatattattgagggaactgcaatgaaaagccaaagacataatatagaatttaagcaagaaagcaaaataatattgcaaaggtaacagtactatgctatcagcatggaaaatgtgttcrataaaagacaagaaaggaattatagatagactaggttacaccttcaatgggtcttgaaaggcagaatgaatttgtatggacagaagagaacctatcctggcctggggaatatcaggcataaaagctcagaggtaccaaatataaggtgttaaggcctgcctaggactgtggctaggttagaattactgaatcagaagctctgtgggcatgaggttgtgaggcagtgggaaatctggctgagargcactgagactagactgaaaaggactttgaagccaagctgagatgttttcgtgttcttgggtggccaccatgatgctcattactgcacaaaagacagagatgtataagataacagtcctgtatttctggactttctaacctggacataatggaaaattacatataatttttcggcaagagattaatatatttaaaatgatgttttaggaaaattaaccagatggtagggagattactgaaggtgggaaattgagagtacgagagatggcttaggggatcttgaaggagtttgcrcatgaactcmgaaaggcttaaaccaagtggccgggcacggtggctcatgcctgtaatcccagcactttgggaggccgaggtgggcggatcacctgaggtcaggtgaccagcctggccaacatggtgaaaccccatctctactaaaaatacgaaaattagccgggtgtgggggcacacacctgtaatcccagctactcgggaggctgaagtagaagaatcgctggaacccaggagtcggaggtggcagtgagccaagatcatgccactgcactgcactccagcctgggcgacagagtgagactccatttcaataaaaaaaaggcttaagtcagggattggcaatttttttgaaatgtgaaaacagcygtagacattaagtaaatgaatgggcatggttgtgttccagtaaaattttatttacaaaagcatgtggcaggtggtgggccatactttgacaacccctggcctaaacttatgacatgatggtggaaagaaagacatcgagtaaagaatcaataaaaggaacttgaaaataaagctttgctgaacttggtaactaaaccaaatagagttagtaggaggaagggcaaggggtggacttggaggaggaaaaagattatcctggagtttcaagcctagaagatgtcattaatagagtttaggagcaggtatcaatgacttaaggaaagagaaagatgtgtttgaattgaggacttttgagaacatgttaaactagcaattggtgaaggcctgctgggccatgggggagaagtctggaacttctccatgctcatgtgtggaacagaacagtattttccttgaggtgatgcttttaaggggagatggtatctgaggaagggcagaaggatgaagataaacataggagaccagcatgtttatgaagtgcaaggaggaagatgaactgtaagaaactgagaaaagatagggaaatgagaaccagtaggataatagtgtcttcagagccatggccaagctaactctcaggaggaattggtcattactgtctgacgttccaagaggtcaagcagaatggcactgagaaagagattgtttcatttcttgaccagaaggttactggtggcccttcaaaaggaagtcccaagagagttgtggtaagaaaaggcatcccagagattcaatttagagaagataatgaggaattaagagaaagtttgtaagtttaaagaagagacacagaacagcaattgaatggagcaccttcttccaagaggaggcttgcttgtgtttgatgacagattttgagaaggattcagtggagaatagacttcaagttgttgcagaagggatgatgaggttaatggagaacagaaagaaggtgaactagctggagaggagtgatacactctgactctggaaatttaagagaacgtggatatcctggaattttccaaagtgctcttccttaatgcattctttttacaggaggcaaatacctttgtccaggcaagatcaggaagtagatggaagcagggttagaattaagggcttaagtagtataaagaagatttgcagtagccattgttataaaaaaatagtaggtgatctcctagaactcaatacttggattattgagacatactcagttttcttttarcaaaatatctctcattgactaggacttaaggctatactgctagcattgaaaatttattttattttgtattgaaacaattaagaagataaaggggaaaaataaacacttctaagattaatgaatatgcctctcgttatctttggaagaaactrtgtggcctgttttccttggatattagcatctccaacaaatagaagagcctatgttcataaatatgattgggtcaaatttgacaatagagtcagactaaagttagctgacattgactttaaaagtacttgcctcaaagtacttgaaattcggtggcttcatattttcttggattagggattgatttctctgctcagacttcttcagaatacaaataactttgtaagggctaatctgttaaaaagtttgtgttagctctcttggcaagagctaggatagcagggtagaaggagaactgcgaaaacaaacaaacaaaggagagttaaaaatgaaagggcaaacactccctacttactttgctttgctttcattattttgcctaaactgttgtggttgacacacgtggacagtagattataactagattctgagccccagatgcccacagctaacacttatgtaatgctcattgtgtgnsatgggctaagtgctataaatgaatgtatatataatataaatgcattaactcatttaattctcatgacgatttgatgaggtgagctctatctcccagtttctagatgagggattgmccaacttgtgggtaggggagcagaatcttaccccgggaagtgtggcttgagagttggcaattgtaactgctggacagatttgttagaaaaataccttatttatttttcagtcctccaccctgacttgtgccttcatcaaaaaagtttgaaatgttttcagttcatacataagaagaaaaaaatttgatatgggtttattttcccctattaacattttctttgatttacartctgttgtatcagacatgatgtgaaaggggtagacaacaacctagactatatttatttttcaatctgctaatgtgaagaaaaaaggggaggagttaggtgagatttggagtctgtaatggtttttctacaccagggtttttagggagattctaaatagagcacactctcatttgtttcaattaaatgccttgcccacttaatctccttttcgtattgccatgcytgatacagagggctccaggactagtttactaggtggtaggacctttagagattatgctgtccaaatcctttacgttagtttaacagatgcaaaaatggagactgaaagggtttaagcagagtgagaacattaacaacaacactttgttttgaaatgaggttttttgattcgttccaaccttcacacaaatttgaaagcatacttttgtgtaagtttcttaatatttggaaattaacatcagccccagcctccctgaaaactgtggtgagttattactatatataaagattaatgaaataattgcttttgagtttctactacaattggtggatcagggtcatctaaaaaaactcaagcaaaggtgtgaaaactttattttgcatgtttgtttttctcctagttattatttactgctcaatcagcattaacagaagaaaaataatttggctgctaagttactgtagtataggatttcaaaggaccttattagagagagatgtaatttcatcccctgggccttttatgtaacagagtgcatatttgggttacttcattttgacccggaattaaacaatagacttaagttgtattcaggaagttaaaatatttattcaacaaagatttaaaagcattttacagttatttccaaattcctagggatatctttatagctttattttcttattttagctaactcttgtctgaatagctccttcatcaaagaattttctgtttatttcataaatcttataagatgtatgtatttgataactactgcatataatcagtgttttttaaataaacatctttggcaaattgatataaacatgattttatatattgcttaactacatatataggccatagtttcgttatggtgctcagtaatgaaaaatatggagtagatgttacaagtggtaataaagctaatattaaagaaagtaaggctgaagattcctaagttcaaaataaaaaggctttgcagcttcagttttaggagcgttttcataaaatgaaagaggcaaatagtgccaaggtgctaccaactccagcttcctagcaatgcaaggattcttcctttagccacttataaaagtggtcacctcagctcactctctgtaggactgactgcttcccctttcttctgtgatttgcatagtattatccacattgattcatgtttggggtgattgtttycatcctcactgtgagattatgaacttcttattttctttccatgaaataaagttttcattggctgggatcccagctagactgatttttttttccttttttcgtttgtttgcttaatattttagattttgaaagtccttcaaaattaaagtacttgcatactatcctagggcaataatttgtgactgaaaatctttgtgaaaaatcctaagaggtatttaaaagtttatgttaagtaagttgttatcagtggttaagaggcctttccagagtgcttgtccactggacatttatatggaacttactgtaatagcatctgcttaatttttggatgatgcagacacattccgttgcacaaaattactctgcaaaagtaagtcaggaatcactcatgataatttcaggttatgcatacttaytttagaatgttgaatcaatttgctaatcttcaaaggagtaaattttacaccaattgcgtctggtttaataggcttaatattttcataatgccagagtaatttttcttcttagttttattcttgcataattgttggaattatatgtacattgttttaattcttgagcccttaatatcaaatagcttgagcattaagggaattaattgaaggccttaggatatgggtgtttattacatgaacatggattgaatgttgatgttgggattttaaacgggaagttgctttgctgttagattccatcacattgaatgtatcaacatttatacaaggaaattgggaagaaatgtactytcagtccctggttgctctttgtttgtgaaaagtaacaaatttaggagttgatctaaaaggaaaatttttgtgttaatgtttttaaaacattaaagcatctttaaacaatatttttgtctcagatgtctagatgcatatttatacccccagaaatttgaataagtctktttaaatatttttgtccttttcctgaatgtcaaccctttggcagagtgtttatatgttaaagcttgaagagcaagtagagatcacacagtccaactctgtcatttcatagatgtaattagagtaaactaaggatcagtctgagtataatgaagtataaaaaagaacttgacactcactgtcacacaacacagttgatagaaatttgttggtcattcgttggccactggtcatcttccccccaggggtctctggcttgcaatgtattcccgtggtctctttctctgatcccctcttggatctcctcctcttccttaggtgttttgaatttctcttctttgtcttcagcatcctcaattcctcctacttcattttgcagaaatttagctgtctttgttatgccctcaccatccaatgtatgcccagataactrtgcctttttcatccaaagatccactaaaagatgacagtgtttttattttttatgagacacatcacctgcagaatgatttttttttctattacagttgacacatagagatgcattttaattcacatgtagacaaacatttgatgaattcctttttttatatatatacttgggaaataggtaaattttctgctatcaataatctctcagaaacacttgatractgaatactatagttaaaaatcatgaatgagaataagaaaggcaacatagtattttaggagggacattatcccactcattgaattaccatataacctgtcatagcaccttaactgctctgaacctcttwcctcgtctataaccttcatcctggcctgcactggagtcagagttaaactgtgccttgtaaaacataaagttctttataaatataacagttagrgcctgggcgcatgcctgtaatcccagcattttgggaggctgaggccaggggatttcttgagcccaggggttcgacaccagcctgggcaacatggtgaaaccccatctctacaaaaacatacaaaaattagacaggcatggtggcatgcacctgtagtaccagctacttgggaggctgaggttggaggatcacctgagccctggaagtggaggctttggaagtggaggctgtggtgagttgtgatcaagccactgcactccatcctcggagacaggaatgttttatatatataaatatagatattattttacatatatatattacatatatatataaaattcctgtgctccctagggtgattttatatatatatatatatatatatatatatatatatatatwtatataattctattctatatataacattctactgtagatatatattttaaaaaactgttagatattatgatattatgagttgcgacagtgatgatgatcatcatctcaactaggcaggtctctttttccctggcaaactattcacaggtaggctactcacaggcttatcctcctaagtagtgtgtttatatgtactcgaaataactacataggacacaatgtatatgctttagtccactgaggaaatataaagaaaaaggatattcttggtctcttgctctttctkttttttttttgttttgyttttgttttttttgtttttttttttaagagacagtcttacttcattgcccaggctggagtgcaatggctgttcacagacgcagtyataactcctgggttcaggtggtcgtcccgcctcagcctccttagtagctggtgtgtgtcaccactctctgctcagtctcttgccctttgtgttgtcattcaacatcgaaatacatttcttcttctttttttaattttattttgaaatggagtcttgctctgtcacccaagctggagtgcagtggtgcgatctcgattcactgcaacctcctcgtcctgagctcaagtgattctcctgcctcagcctccagagtacctgggactacaggcatgaaccaccatgcgtggctaatttttgktattttattttatttttttagtagagatggggtttcaccacgttggccagacttgtctcaagctcctaacctcaagtaatccacctgcctcggcctcccaaagtgctgggattacaggtgcaagccaccacagccggccaatttcttcttattgaaacgtagatgtcaacgttgcatttgttagatatttcttaactttctctcttatttgagtatctaacatattgtatttcttttgctctagtgtaatatagctaaattgctagactctgaattaatatcaataaacatttatatcacacaagatagtgttatactaaatatatttaaatgttttaaatggtttcaaagttaatattttgagtaatatgctatggatggaaagcttattcatgaccagtataagttatacaaaattaatgtttcaaaggatgtctgaatttcaaaaggactcttcaaatgatcagctccataattatatttttcatctaattttatgttcaagtgctcccctagagtggtgataagtgaaatcatcgattaatgctaggactctaagctgacctagaaaaactacatttgaagctgtattcaaagaatttcatttagccttactaggacaactgtcattcttatgtaacattttaaagttttgcattgagattgggcttgaaataaatgcctgcatttgctcagagactgttaaggagggagatagagtaggaagttgtctccagaaataaaatgataatgaaacctattgtttatcgagtacctactaattataaaccacagtgattatatatgacataatttttcatagatactaaatatatgtatgtatatttgcaatttttatccttgcaaaaatgacaagtataattggggtatttacattctctttttaaagacaggacaataaaatctagtaaggttaggattttgcccaaactcatatagaaattagcaaacatgagatccaaatccaggtctgtcagaccgcagggtctttgtttactctgctatatcatatttattattcattgatggatgtattaaacaaagattaattcagcccttcccattgccaggaactgttatagatgctgaaaatactgcagtgaaaaaagacaccaagttcttgctttcaaataatttatattctagtgaaggaaatagaatatacaaatatgtctagtggcattaagtgctacagagaaaagagcaaagcagtgtaacaggatcgaaagtgatggtacaagaggtatttgtactgtattgctgtggaggtcggtgatcagggaaggctccttctgtaaaactgacatttgagcacaggcctgaaggaagtaaaagagtgagcttatgggaatacatgaggaaacagcctacaagcaaaaggaggagctcatgcagtgctcctcaagtggggacttggtggcatgatcatggaacagaaatgaggctagtgtatctgaagcagagtgagtgttggggagagagtagagcacaaggtccaagaggtggtgtggtgtcaaaacctgtagaccttggtcaggacgttggcttttactctgagggagacgtcaagtcactggaaggctttgggcaaatgtctgacatagtgtgccttgtgttttagatggagaatagactgtaggacaatggggaaggatccaggagaccagttgggaggctgttgcagtagttcaggcatgagatgatggtggtggcttgagttgggttgtacttgtggaagtaatgaggagtggtagaattctggatctatttcagaggtagagccaaccagataagctgatggtggatgtggggtctgaggaaaaggaagggtcagyaatgactgtcagtttttgaccctaagtattatgatgagaagcttttcgggagggaagatgggaaaaaaaagagttcagtttttgtatgatgtggggtaggttttttttctcctctatatggcaaacgattcccagcacatttcttagcctttctcctttttcattcatcatctatttttttatttatcatctatcaggtgtccatttatgtccatgaaaataggtttaccaatcgtcttgttcaaagcttccatcttactgatctttatcacttgacctgtaaaatattttgttgttgtcattgaatctatcaactagcaagacaggtgtgttaaatttcccactgtgatggtggatttatcagtttatcttacaattctattgttgttatatacataattgaaattatgatactggatgcatgcactaattcttgcattaattctttctggtgaattcatgcattaattcttcctggtgaattaaattttcctcaatatgtaatgctctttatcaaatactctttgttttaaggtcctttttgttttttatgaatgtgtctacacacatgatttctttagatagcatttgtgtttctgtttttgagctcctattgtcttgaactttatttgtgggaatccctggggtctgaattcagattcacttttgtcagacacttggaaaccctatcatctggggttagtttaaagtttgatttaggacttgtttggcttcacagatagcatgaattttgatcccaaattgaatattgcgggcttgtggttaggaattgtcaggaacagtgttttcttcttttcctcctccctctgagccaaggtcaaaacaggcttgtatccccatcattgccctttgcaagatggggcttttctggtttatcactgagggtgcagcccttcagggaatccactgtgatgtgaccatcccacttttaatatctgaagttggactcctggttttgccttactaacacccaagtttgagttcagggcaaacacagcctgtgcttgctaatcctacagaattttcacgtcttttcctttttgttctctgagatattccttactttcctgccatccccaccaggcattaaaagatgcttcatttttgtataatatttttcatctgttgtaccaacaaaggtttctctgaacatctgattcacagtagttcttgctgacatgcaacgttgtaaacataggagagtttgaagccaaacctagcactgtggtatctgttcaccagctatgtggggtggatattttcaggttgcatgaagatcctgttcttcacaaccattcactcagtggttttagcctccactaatgattgttgcctgaattacttattacaccgaggctacaatatggtgattttcaaattctattatttcttttacatttattagttgcctttttttctgtaaagaaaagagtttttccycagcatctctttacttttttcttgtcttgtgttctcatggatcattttttaatttgacgtgttatacttctttactatgataattattttgatactcaaattgtcttgaattttagggtggaagcccctgaagccaactcctgtgcccttttgctgtgcttcactaaagtctttgagtctatctttgctttttggcagaataagatgtcccaggctggctttatactttgtctgctccagatctggaakcagccaatttttctgacgaatccggcttcttttgatgagaagcgacattcagaaaccaaaattggagttctggatgtacctgttcctacaagtgtcattgtatttgggcccttttagtggaaagaacaagaaaatctgtgtgtgtgtgtatgtatatgtgtgtgtgtttaaatcataagtctgtattggtattctcaactgagagtttattttctctgaaaaagtagtgtcagcaattatagcatagaggtaaacaatcccagtttttcgatgtacttttggctgtttgaccttggacaatttacttaatttcactgtctttcttagtttccgcatctccaaaatcagaataataaaagtacctcaagcatagttgtgagaaataagtgtgtggatttatataaagtgctcacagcagttcctggctcagaggatatacttttaaattatttgctaaaaatatgaggtcggaccgtgtgaaactgccactatttgactgtctttaacctacagaaataatttcatgcggttcatcctgataaatgtgaacaccttcattgaccgaatgccttttaggggcagcaccctttgctttaaggtccattttgtttgtatccacagctctgctgtggataaagataagtaaaagagtctctgccttgaagaagctgagagattaataatagagctataaataaagtttcctagcactgtagtgctttctgcctgtggtgggggaatgaagcaggactcttcttaggttaccacaagcgacttgggggaaggagacaaaatctggcagtctgctgaacagggcggaattttagattgaagaccctagaattaaggtgggaactccaatgggatgtcctcagggagtcacttaggaaaatgatgaaccacgtgtgtgcaataatgtgtgcaatttgacacacagttttaatgcagacaaaaatctttaataatcatgaagctatttccataatatgaagaaatttaatatatgttaaaattctatgtatttctttgttgttttccttttttagaattttctgtgtgtctttcttatgtgccggaaacccaacctcagagcagtattttcaccattgagatggtgccattaaacacttaaaatcggctgggcctgtgatcccaggactttgggaggccgaggtgggtggatcacgaggtcaggagatcgagaccatcctagctaacacggtgaaaccccgtctctactaaaaatacacaaaaattagccaggtgtagtggcgggcgcctgtggtcccagctactcgggaggctgaggcaggagaatggcgtgaacccgggaggcggagcttgtagtgatccgagatcgcgccactgcactccagcctgggcaacagagtgagactctgtctcaaaaaaataaaataaaataaaataaaataaaataaaataaaataaaataaaataaaaacacttaaaatcaagctaatgtgattatccttcacaatagcactgcgattagaagtttatatgatgatcatgttaagatgaacatggggattggggtgctaactttatatatatacacacacacttatatacatatacatatgtatatataaagatctctatctatctatctatctatctatctatctatatatatatatatcttttgactaccccacaacccaactactaatagcctactgttgaccagaaatcttactgataacataaactgttcgttaacacattttttggtgttacgtatattatgtactgtatgtaagctaaagaaaagaaaatattaagaaaatcataaggaagagcaagtagatttactgttcattcagtgaaaatgtattattgtaaaggtcttcatcttcataatcttcacgttgaataggctgaggaggaggagaaagaggaggggttggtcttgctgtctcggggatggcagagatgaaagaaaatccacaagtgagtggacccacacaatttaaactcatgttgttcaagggtccactgtagtttattccatgattctgtcatcatctactgttaaatattaatgtaatgagagtaacataaaattaacacaactatgtggctgaagatacctgatcttccttcagaagttagtttcttttactggccagtatttagtctctgtattaatcacaaatatttgtacaaaatgtattgttgttgttattattattattattattagagatggagtcttgccctgtcaccaggctggagtgcagtggcacaatctcagctcactgcaacctctgcctcctgggttcaagcaactcccctgcctcagcctcccgagttggtgggactacaggcgtgtgctaccatgcctggctaatttttcgtattttagtagagacagggtttcaccattttgggcaggcaaaatgtattataactttgtttcttgtaggcatgttgcattcttatactggctgtaattattttcagaagtgctttaattgatgatagtgtcagaatggaggaatattatgagactcttctcatgaagtgtcttttataacttttaatgagcgcaatagttagatggttaccacagctggtctgcttccctactgtattctatgtgtccagttattttcccagtccttatgaaattaaaagcaaagtttttgcaaagtactaagaaacatcttgctaaaggccaactctagccaggccttgacttttcgtatcatgtgtttcatattttacacactttgactgtaatgagactggcatatccatgtgagtcacgctgatgaacaggatgtgtgtttgtatttacgttctgtatgagggttttttggaatatgtgaattattataatcataagagtatattaaaccatcttgataagaaattttaaacatgtaaactattcattcaaaaaaacatttacagagaatttccttaaggaaaacctgatgaatggatgtttatcttttraacattatatgattgtattaataacacatgatgaaaattctatccactgttatctttggctggtgagtttttcctttgtgtacattctgaatttccaggtttttcccttgatgcaccagtatgacttttatgattatcaagattttagtggattcccggatgccttttatttggtgaagaaaacaatgttctaatacaaagtgaatgaaaatagctgcacatatgatattaatagccagcatttatcaaggaattactgcacattaagcatgtgttaagtattctacatgtgttacttaatttaatattcacacaattgtataaagaagatgctatttttatttctattttatagggaaattggaacttggtgctgtttaataacatgtacaatatgagagctagtaagtatcggaactgggatttggacctaccttcagaactcaagctcttatctactgtgtcacacttgatttattctgatggttttcattgatgctttcatttatgtgacatgtttttgccagtttgcattttgaaggaggaagcgctgggcttcaggagcagaaggatgaatgtgacatagcccatgctctgaaggagcttgcagtctacttgattagacggtcatggagctgtgggcacatctgcctgggacgaagagagaggaagtatcaggttgacttcttggagagtgatatttaggcttagctggtatagaaagggagaagggtattccagatattcggggaagtgaggacagaatttgcaaagcagcagtttttgcaaatgactcagaaaccagattttgaaaagccttggatgcctagtgaaggagttctgggttacgcagtgtgaacactggggaaccattaaaagaatgtaagcaataatagggtgggatttccttatctgttttattttttgctctttttttttaaataaataaataaaccaaagatttctctagcaatggtgtagaagttctgttttagagtggagagtttccagttaggaagatcatattgaaggctgtctgtcaggagtccaagatcaaagtccttaggggataggaagagatgaaaaggtttaagtgcctgggatttcaatctaatactaaagttgtacaaaaattcataacacttttggcagtatattcattaataatcgtttctcaattgaatgtgtttggaacttattcagccagaagctttgatactctagaaacaaaattgtttatagcaaacaatccgttatacttgtktttttagcctagctcttagcttctgcaatgaagttgagacttttaagaaaatatatacacagtacacacaaacacacacatgcttacacaacaacttactatttatcagcttacactaagtctcaaattggtataagttttaaaagttaagatcttaaatcttcatgaacagatgatagtgttattataatgtgacaataataaatttatttttattaaatgaaaatctttttgaaaagttcgtagaattttaaatgtttgctgtagtcaagaaatattatattagcaatatcaaccacagataaaagttttatattatttgcctaatccaggggtttgcagatttttttctttaacaagacagaaagtaaatatttcaggcttcacgggccatgcagtctcagttgcagctgcttaactctgctattgaaggatgaaaacatccacagccaatatgttaatgaatgaatgttactgtgttctaataaaactttatttccaaacgcaaatgacaggatggatttggtatatgggcagttatttgctctatagttttgtttgtttacttgttcttgattcttaattttataatgatgcaggcttacactgaacaatactgtatttggttctagtagatgcttcttttaaccatattggtattcagtgtattgtcggtgatgcttttccccttagtgacatacagtaattttatatttggtaggactagatacattaatttatttgttttggcctttatgtcttcttgtcatttggatttcatggtgacttgactgtggtttgttctttgtaattatttcagatattcacttaactagagaggttgttctgtctatcagaaggctgattggaggcatgtgctggagctagaccagtgttttgcagccagtggtatgaacctggagagaccaaagtttatagcctctctctccactgcctccaagatagtgactgtgactgggctcctttctttccttcgtttctgccttcctctatttctggggttagttgtagatattttgaatactgatacacagtaaaattttagtttagaaacacaaaattttgggggttcatttaattgatggaaaagagaatatttcactttatcctttaatacttggtttaggaataatatttgttctctgtaataaaaatcacaaatgtgacaatataacagtttctcctactttaaactcacttgattcatgccatctttccttattgcctcagcctgaagtggtatctcatgtgccatggttccgttagtactttgttcatatcactcctatgaaatttctgtggcactaaatttaatatgagattattagctcctggctggaggtgaaggtggaggtggagtggtgggtacaggggtcagacagggaagacttgcctcctttatcttcagccgttcctggagtctaatgcagtgcttcacatgcagaaggttcagatcagtatgtgatgatggaatgaatggatagatattccacttgaaggaacaagggtgatgagtatgatattattgctagcagtaatttccttcatataccttaaacacataaaacttcctagtgggtttttgtggccatcatttagctcacccttaactaagcatcaatcctgtcctaagtattattttagattctggggatacatactcaattacttaattatctagtggggaagacaaacattaacatattattttaataaaatgtggcaggtgcaactctgggagctgtgccggattctctggagtctagaggagggcaccccactctgtttcaggaagatggacagtcttttctgtctcttgcattcccagccaaatcctgaaatatgcatataggcaagctagggaaataacaggaagaagagcagaagaaaatttagactgaagggctggctttaacagaggtgggtgagacaatgaggtacagataaggattctcaagctgtgttgttggaggataagtctggagaaatacactggggtcagcttctggagggttatgtgtatcatggtaaggagacttgaactttatcttgagaggaagtagagcatacagtggtcaagtggccattgtagagttttacccttgcctctacattttctgaatgtcagacaccttctctgtttttctcacataaaatggggatacaaatgatctatctttcagggtttgtgtattcattcaacagtgaatttatgaatgcataccatgttccaggactctaggccttgggaatacagcactaaacgtgagataaatccttattccaaagagcttatatttctgagtgtggtggtgagatagataagaaataatatcagtgaaatatacagtctgttaaatggtgggtggaggataaagaatctgggactaggttaggagcgaggaagagggaaggctgcaattttaaataacattgtctggaaagaattatttgagatgacaattgaatgaagacctgaggacatggaggcccaattaattgagggtatttgagagaagagcgttttggagggaagagcaaatgcaaagaccccaaatttaatgcctgacatgtttgagaaatgcaaagagtcatgaaagttggggcagtgggagttatagtaagagatggggtcaggctagtagtgggggccagagtttgtaggtctttattggtcattattaggatttggagtgagataaagccactggagagttttgggcaagtaataacataatatgtttcataaggacaccttggctgctgttttgagaatagcctagctagggcaagggcacgaggaagaccggttacaaggccagtttttaggaatggagtggtgagaagtggtgcttgtaaggaattaaataacttgtaaatcacttcatatttaccgtgtgcctgccaaatggtaaggaattaataaatgtcagctagcgtttgactgttaaagcttctatctatgctcagcaaacagggtttaattcttttttaatctttgagtttcacttgtaagaataggaactttgctggctaagataataattgctatcatttagccaagagcattcatggtgagttagcattgtacagcctccttagcatgttttctcctaatcttctcactaacccaaggtggtagctctccttacaccaagatctatgctacatgtggtaccactggggaagttgaaggtattcaggaccacagaattggtaactggaaaccaggtctgtctttttcaactatgtccattagattgcatctgatattcaaaatttcaagtagattctatcaaagaataaaatatgtaaggaaagaagcatatgaaggacatgtctgttatatttctgccattattggtaactcttaagtaataatgattatctatgtgcttaatagatgtcattgtgtgtgtgtgtgtatttgttcttctaaatggtatgtttgatatgatcacagacgacattgtgccaaatgtaaccacttttcctggcggttttaatggtgttgcaagagtctgtgatgcttctggktccttttctgtccgatgtagacaatgcattcatattgcatgatgattagtacaaagtacaaacaaggagactagagaaaagagaggctaaatgaccaaagatacttaccgcggtaagtggcagagttcatttgagaattcaacagattggctccagagtccgtgttcttgctgagtagatcaccccaagggaaaactataggcatgtggtattagaagggaccttatagacagagctcttcattttgcatgtgaaaaactggggttctgataggtagaatctgtagccagtaactggtagagccagtactgtaatctgtgcctctcacttccattacctggcacagccttaatttgatcagctgtttttccagatgaaaagtgtattctccaagggaagaaacaaatactttctttattctcttaaagtttgtgagtggctgaatgttttaatgtgacgatttattaaaaactgaatctttaatttgaaaatcagatttgtatctttcagttgttttatatttaattatattgaaaaatcagcaaatttagattctctcatttgtttcatgttcatttatgatagctaacacttttaagaacctgatattgtagccatatttaaatagttatttctacaaatcaaatataaggaataaaatatgtcttatttataactcacataaatttaaatcatagaagaattgaacttgacagagatcctcagtaagaactttaaaaaaaataagtatcacatgtatttaatccatacttcccagtcattgcaacaaagcagggtatgatttatgtagaaggaaaacatttttttgttatttttgtagtggggcatttattgcacacacagtaagtgttataaccaaaacaaatatacaattgggacactgtgtttaaattatcttctgtcatgtactatataaacccacaatagtttgaaatgtatttaagccaccatctgggacaaagcaaaagctgttccaggatccagcacatgatgaatgtgaggcgagtttcattaggagcctcctagcacgtttctgcatcctgaatcgtttcttccacggtttgaaagaattccaacatccgtcttagctccctgaggttttgagtgtttttaatagatcatgaaattttttgtggcctcctaaagaactaaatcagtgaagttaaacattattgcatttagatttccttttaatctggagagataaaattcaagtttgtatcttttaaaagcttcagcagaaatgccccatctgttgggaaaaattcttactgggttttgacagtttgaaaggaataatttctcttttaaagatgactcaccttaattgagaacctattgccatgataacaggtagctatttaatcaagtacccattaagtgctatgggctggaggcagttcaagccttaatactaatctggcattctaatccagatttgactggctgtaaagtttatgtgagtgtttttctttcaggaaactgtttgttgccttatccctatataatgacaatagtacaagtagtgatagttactgaggccttaccatgtacaggcatggttctaagcactttctaaaaattatctcacttattcataagaacagtcttaagaagtagatacatttataattcccattttacccgtgaggaaattgaagatttgaaaggctgtagaacctgctggaggttacatggctagtgatatggtttgattgtgtcatgacccaaatcttatcttgaattgcagctccctcccataatccccgtgtgttgtgggagggacctgataggaggtgattgaatcatgggggtgggtttttcctgtgctgttctcatgatagaggataagtctcatgagatctgatggtttttataaagggcagttcccctgcacacgttctcttgcctgctgccatgtaagatgtgcctttgctcctcctttgccttccaccatgattgtgaggcctccccagccatgtggaactgtgagtcagttaaacttctttttctttatagattccccagtctcaggtgtttcttcatatttcttcattagtccatgaaaatggactaatacagctagtgagttctagccttctaatttaactttcatggcaatgcaggcattattcctgtttttacagatgatatagctaggatcagagaggttaaataactcacccaaatcacatatgtaataaatagaaaaaggagctgaatccatgacttctaattccaaattcagtaatyaaaaaaaacttcaacttttattttagatttggggtacatgtgtaagtttgtgacatgggtatattgtttgrtgctkaggtttggggtttgattgatccactcactcaggtaktaggcatagtactgtataattactttttcaatcattctctctccctccttcccctttctaatggctcccagtgtctgttgttaccatctttgtgtccatgagtacccagtgtgtagctcccacttgtaagtgacagtatttggttttactacttatgagatgcggtatttggttttctgttactgtgttaatttgcttaggattatggcctccagccgcatccatgttgctgcaaaggacatgattttgtcttttttatatctgcattgtatctcatggtatatgtgtaccacatttttttatccaaattcaataatttttaaaactaaaacatgttccttcattttcagcaattatatgtatttttatgcatagaaacttaaatacaactatgtaaaatattttaaatatgtttaatatataacttaaaaatttttcagagaggtatttttttgaattttttttatctaaattgaatcagagaggaagcaaggttgtgactgtggatatgacttttcataactaccaaactttctgtaggtggactagaatattcactttttaaaacaaaatatagcaaaaaatataacaaacacagaaaagcacttgaaatattgtgtttgaagagatttgtgtataattttgctatgctattgtccaatatgatacagtttcctttagtagttactttaaatatattttttattattaaaacaatataatattcttttataggttatgaaaaaaatccctaaatggtgaaattaaagatattgaagttgaggtttaatgcagaactgcacttgttttcagggaacaaatgtcaatatattaaagagtttaagtagtgtctgataatggttatatggtgatccagaagtacagtaatgattctcttaaaatattccattttaacttattaggcagttatggcttcttatatatgctataagcaaatgtggtggaaacatattttgttttcataaaaaatttctgttttaaagccttctagacattttcaaacaaatctttgttctctattctgattaaggcagtactattccaaaatatttaggagtggttttcattaatttgctattaatgttaccattctggcttctttcctcaataggagactaataaaaccatgtgccgcagtaagataatgtactaacatgccaacatgcctccttatttgaaaccagatctctttttctggtttgaaagttgtggatcttaaagttctctggcacaaggaaggcaagtgaggttagctatggagagaagattgcacaattaaaccccattgtaatgtacggtctgtctggcctagagcttcatcttattcttgtgattatgaaacagtattctgtcctgacgaagaaggtagtggggaraagtttctgggatttgtaggagagtagaaaagaaagatatttgggaaggatatttttaaaaaagaagggtatctctatgatttgctgacaattaacaagtcttaaacagacaatcttctcttaatatgaggttttatgtgatgttgtgagggagcctgrtattcacaccagtggcctcagttatcacacagcagcgaaagtgaggaggtcaattttacttatttggcaatttaacgtgaaagcactgggttgtgttttgataattcctgccatataggatggtcaataatttctacttgcaaaaggaaaggaagcctttttcttagcaaaatattggttggtgaacaggaggagatcttagtgccttgttatttcgcatctgtgtatttgtcatcttattctgacttgaaaactacttcactatctatatgattattttggattctgagtagttactcatttatctcccaccaatatgttattgcaacatgtgtcatctgttaccctccccacatcagctaatcatttgacatataattttaatataatatgctaggatacagatttagtttgaagtttaatatttttcttctagctttggtgagtgaattattaattgccattgtaaagaaaaatgtatcatataactgacatgagaaatgatcgtcaaatatttggtratagttttttgaggacttacgaacttgaatatggcactaagatttggttaacagtatttccattgatttcaagacttcagtgactaaaagatatttggaggagwcttggggaaaactaaattgtgaaaaacgctgaaaagaaatttgtagcattgcagactgtagcagagttatatgatttagatgccttgtgtttagccaaatcaaaaatccaaaaatggatttctgaatactaaagtattaggataatttaacaacatgcctaccgttaatttcctaggaaacaacttcgtgtgttatgttttgaactttcctttgtattagatttctagaaggacttatattattcttgtttagtttccattttttagaatgtttcttttgatgatcctgtaactctcataagagctcagacttttcccctatacctatatttgaagttgtcttttgtctctctagtatttcaagcctaaacctaggtttcactattttcttcttgcttattccccacatacattctcttagtattaccattacccaggcttgtccattttatccctcagtctgttccaagcctgttcacacctttcctgttctactgccttcacatctgctactgccggcttgtgataatccctctctggaccatggtagttgcttctggcagtgtcccttccttcccctctttcctgtggcatctcttctttatacaatggaagtagtaatttttaaaatttaatttaatttttatttgtttatttatttatttttagacagggtctcatgctgttgcccaggctggattgcagtgatgcgatcacggctcactgcagcctctacctcccagacccaagcaatcctcccacctcagcctcccaagtagctgtgactacgggtgtatgccagcatgcctggctaattttttgtggagatgggagtctcccagtgttgcccaggctggtctcaaaaacctgggctcaagcactcctcttggttcagcctcccaaaatgctgagattacaggtctgagccactgcacccggcttaaattttagattagataacatctacctcacctccaaagcccttcagtagctagctccctgttggactctaaaaatcccaactccttagtgtggcctgcaaagcctgcatggtctgcttctcctggattgtaagctccacgaggacattcattatcattcaggaatgttcattaaaacacttgtgtccaacaccggcactgtgctgagtactgggacatagtaataaattaataaataagaatgagagaagaaaaagaaatggaaaacaggaacacctgtggactctagtcatggaacttcatctactggtagaatagatattatccacgtaattgcagaaagatctgttaaaagtacaacactgataaatgctgtgaagaataggttcatgattttatgaaagcaggtaacagtgaagtcttactgagatagtcatgactgaggtgatgagtgggagtacaggaggttggggtgtttgtgtgagtggggagaggagagaatatgcagggagggggttttctagaggaaaaatctgcatgttcaaagcctgtaggggcaggagcagactgtggctagaaggcaggagcattggyggttacctgctgttaaggatttctaataagctgaatgtggggaggggtgaggaaaagggaggaattagtaggcttttggttaagcacttgggtggatcttggcaaacattaacatttggagaggttcaagtcttggtggtacttgtgtgtgtgtgagagagaggcgcgtgcacacacacacacacacacacacacasagagataaagcaagagaatatgagatctaccttaggcaaatcacttaaccttttgaattgcagattcctatctcatttgaaaaacacacctaaaaatgcctaactcattatggtgaaygtcaaatggaattgtaaaaatacgttataaactgtgagttggtattggtatacatgtagatgattgtagttaactatttctcagatatttccttgtattcctcaatattggtttgcagccattcaagctggactatcattttgatattcttcctcaccatatagctttgctcaagactccaccctcaacaacaaagtaaatgttttaactggagctctaactctttaatagcttctttgcttccatcctctttttctgcttctaagaaatttaacttctcttcttagtttttttcttaccacccttctcattttttttttccattccttccatcttgggctatatttcactttcagaataggactttcttccatttccctgtagcactgagcctaagactatgcccttttatgtttcctttgcctttccttgttggggagaggggtttaggattaagtgtaggtgtatccacatctcctaagatcttttaagattatattttattttcattttcttcttagtaagcaggttctcttatttaaaacctctccccaaactcatgtcgataacattttattacttttttaaagatagaagttacatattggacttataaggtatgggagtgccagggtgtgggagagcttgctttgttaactttttggtttacaatgaaggagatgctcccttttattttggatagaaggacattgttcctcctcctgtggagtaggaaagtttgctccaagccaagcatgcctccttcctgaggactgaggaatagctatctgcctgtgtctattcttcacattgcctggagaaagttagaatagaggtggagattgagtatctagccacatgaagtgattcttactgtcattcatatttaacatttattgcctttattttggggaaaaatcatttagatggaagactcctctctttttaattttatctcccattccagctgatctacagtatattttctaggagaaaatagatttagatactaattaggataatttaatgaaatataaaatctgtgcgaggttagttgttgctattccaataggaaaatgaaactggattcagttatcttattgctaaaatatgctaaccaagattcagctattcagataactttagagctgtaaaatatattttataactctgttttcattctttcattaataaatacctgcagtaattccctggcttattttccttacacagttgttagagtaggactttgttttctgtcagtttcattcatttcattattgtatttaagctgactatagagaaatcatgttagcaaatgtatatgaattatttctccctttccatgaggatctttctgatgtcttattttttttctgagagaggctgtgcattgactttggttagaaatggtctgtcttttcaaaataacttctatgtaattaaaaatggctgaactctaatatgaagctgttatcttgaaagctatttctatatttaaaaaatcttattttaagttgtagaaagcttgtatgttttatgttagtatctgagtaaagctatcaatggaggtacatatgtggttaaagtgatgaaaatataactayggttaaatcattcatctgttgcaaattacttatgacttctgatacagattaaatgaaatgctaggaaaaaaatatagatgagaaaaatataagtagcaccgtatgtgccaatgtgtgactgtatgcttgtatatgttatacacaaaagttgttaacttctgcaaaactttgaccattttcagtttacattgttaattttcatttatttgatttagaaagaccatttaaatatgttcttaaacctagtgacaaaatgtgtggaaaaataatgagaaacatctcacagttaaatatttttgtttttagattagtcatgaatgtcttctttcctgtagtgtgaatggcagaaagttaactattcatggtgtaatttgtgtgaaaacatctatacttgcatatttatttttattattctattttatagaaagcattaattctccaacatggtaataaaacatgtttttccttcaggtacactggtgtaacttcccttctgcatgaaaatatttcagtttatcaaatcatacttttcaactaaaatttggttaacatagaaatgttacaaccataaaaataaagcgctagtattaaaaaaggttaattttgattttgatttttactgtctttattatctttaactgttaaaacatgtttagctcctaaaatatttaatagggtaatttaaattactgcatagcaccctccttttagtagctggtggtaggaactccaaaccaatggaaatttctagctgaaattggaatccatgaagaaccaaactcaggagccaccttgttttccttcctcatctaatatggatgtttaatttggggtggtgactgacttttcaatacaactttaagagaacattctatataaactgttgcgtctccccagctaccctcagagaaaaccacatgtctaagctgaggggaaattcacccgcatggaacggagccagtctcttggagaagaacatggttgatggaacccctgaacaataaagatctgtgattactgaagcggctcagaatttcatttttgaggccactaaatcactcttggcctgcacagctgtgtagtcaggggaggctgcagatattattcagggcagcaaccacagagtctgttttttatagaatattttcccagtgcttttggaaactcatcaagtgttaaaactcagtattttctgggaaagttgaagatttttctctccttttatggcaatttcaacctcaaggtgaaatatttctttaattatgtgtaaactttattttttaaatgagaaaattacattaaaattacaattttgtgggacattattaagcaagaggggaaaaatctaccgttatgtgaggttgggttgtcagatatttttaaattcagaaaatttgctgagaattctccttccaaaatggtaaaagaaaatgagtgcaagaaacgcgccactgatagaaaagtgggaagatactgaagcaatgttgggaacagaaatgatcagggtgactgaagcagagtcatagagccttgaaataraagtaaaaatgtaaaccacggagacaaacaggaagcttgtggaagtgaatgatggtgagaaatgtgttctacagtaagatcatgaggtatrtggattcttattttacattcattttaaaagcatttttccaactgctaagatttatattattggaaagatgttttgcatcttctaatagaaattcattttggaatagagtggcagccacagtgtgggaacttcagaaaagggggtgatgtaaaatcaacaggaacagagtgttttttgaagtgtcagcagcaaggtctggctaatgggagcaggctgtgacactaggcagcatgtactccagaaagcacttctgctttcccgtagggcatcccgcagaccctggctgggctcagcaccaccttctcattgatgtccctgtgtaggtgggtatacgatacgtatgctggtcaagaggctgtccctaattctcacttcagtaagctgaaaactccctaattctcttaaaagcctgaaaactttacrtttttctcagcaaatagttgatattagtgaaggcctatttagagatttctttgatattataaagtgtgctgatgatcatagaaaaaaaaataagctgcatttatttgttccctaaattcttaaatacaatcctcccaccgtgcataattacagtccccaaggtaaaaatctgacagttgtacttacataatagttacataatcagctacttaaataggttttagctattagctaaaataaataaatcctagagcagatttttctgggtagtgaagttgtctttttgtagctgttgagtactggagttctttttagataacctgatagtttagaaaattaatactgaagcaattaattgaaattgacttcaacctaccaattccacgactgtcgttttcttctttagttactttccattaattgactacgctacccctctttggccctgctgtacttgtacatggctatttattcatactgtgttttgyctctcattcatgccacaccaacagatgcataaagtgtccatctctctattttcctctgaaaacacgattttgatgcatctggcatggccttctttttccttgtgcatattagttgaaggtacgtgtsagctggagctagggctctcaccacttcctaactgccttgtgttggccgagaggtgctctggagccttccctgggtcctagtggcttactaggacctagtagtttcttcctttggcctgcatagaagcctagcttagcatagaagccttccttcggcctgcatagaagcaaagctttactcattttggaccattgaggcctcatgtgaattctttgtccattttggatcaaaaaaggaaatgacaaagagagacagaaatagaggttagagagacaagagtctacaccagatggtgttctcaccttcaaacagctgctcaaaactgtacagctccatatgttctcttggcttatcaaaaagtcagaaggctctgagacattaagaaagagatacttgtgggcagctcatttcaatagctcgtagcacaaacctgtaattaccacaggacaggtgtgtgcagatcttcatgatgctttgaagaatctcaagttcatttgagaacattgtcataatgacccatataaataaacagccaaagattaatttagctgccaggtaagcagtgaccaaattgagttttcagtaacaaacccagtcatcatttctcctgggtaagcactggaaccaacatacttatgattttattatgaattatttgtgtatgtaattaataataatgtatttctgctctctttgcttttatataggaactactcaactttaacacaattctaagttaatatttattcttgttatatcattatttggaaaatgtgcttagattaataagtgtaaaaataatcataaaataatacatctcaatgttctggagtaaaattgttattaagtgtatgaaataaaaaacaagttatgtcttctcttcatcgtgtcctttctattcccaaggtaataatcacctaatagttgggtatctgaatttctatatgatcattctcaatctcactctcaatcatctccccttttgtccatccatccagccccccrttcatctatccatccctagattcaccagttcccccatcctcccatgcccgcatccaggcatccacagattcacccatccctccatcccccggtgccccatccacccacccatccacccattccctcatccatccatccatcctccttccgttgatccatctacccacccatccatccaccctcttatacaagtgcagcctttatctcataatgaaacttgctttttaaatgtagttttgaagataaataatacatatttgtagaagtcacctgtaattgtttattgacctacaattcatggaaatgatgtcctagtgctttatttcttagcatgtagttatttagttgggactttttatttttgctgaagcatggcaatttgtgagcaatttaagtctctgccttgtggtaggggttggacccttctatgggtgtgactcttcttttttattgacttcrctgakgatagaacttaggggaaaattatgagaggaattaccacaagtgtagaatcggaattttaaatctgaaaaggcttggagattgttcagaatttgatgtaaacatttttctggcagtgaatgaactgttaaaactgtgatttgccggtggaggtaaacaaaaaccaaagactttytctttgcttgtcctaatttcagatcctagttcgcttggtgcctgtgtcttcatcttcgtatctattctgtcttcccatctgataaaacttgaggttggtttattctgtttccagatgctctttttattctgctacccagaaccctcttggttgaaaaagtaattttaagccattcttttttttttttttaatcatccagagtctcctgagctaatttagttccttcggcagctttgactgcccttttaaacatccagcatacctgagtgggttctgtgcctctatagatgttgctgacacatatcactcgtatttatttttgcctggtactctcatttgtatgtaagtgtgttcctaatgttgagtttccttgcaagtcctgaactgtgttttctactttcttcttccacttcctttgtactattcatggtttttacgcacgcactatattaatgcgatgatctgagcataaagtacgatttttctaaagctcatatgaatctgtggagttgtgtccaagcagtgaatctggttataggaggccacatttacagcatttctgcttaacagcctgtccagcaggcagctccgtgctgtctagtaagtcctcattctgatttgtatggtgtagatccatctgtgcagaataaaatttcatcccttctttccctctcccacctcttctatcagattttagacctcataaaacctctcttcactgctataagagaagagggaagaattcaaccccagggctttgctccaagctttgaggatattcacatggtgatagcttttaaaagatagagaatttcagaacaaggcataagccggaagttgtgactctgcatgcagaattagcagtyagaatttagaggtacataagtatctgtaattgccaggaaactagatgagtaaaaatcttccctatggattgcgcctttttttcttacttcatagctctgtcagtttttactttgtgtattttgaggtcatgccacttatgcatacaagttcataattattacatcttggtggacttctctttgcttattggatagtgtccctttttttttttaccagtcttaatgattatttttaattaaacttttttatatcaacattgctgtatcagctttcttttggctagtattactttgatattctttctaaccccatgttctcgcttaaaaaaattgttttgcgtgattttgttttaagggtgtctcttctatgcagaatatgttttacttctgatttttttcttttcttttcttcttttttttttttgagatattgcttcactctgtcactcaggctggagcacagtggtacaatcagagctcactgcagcctcaatttcccagctcaagcgatcctcccatctcagccccccagagtagctgggactatyggtgtgtgccaccatgcctagctaatttttttgtatttttagtagagacagagttttgtagcccagctggtcttgaactcctgggctcaagcaatccacccacctcagccttccaaagtgttaggattacaggtgtgagccaccatgcccagcctacttcataattttaaaaatagctctgataatttctgtatttgaatagggagtttgttatttacatttattgtatttgtgtgtttgtatgtattcatattctattgagttttcratgaccattccttttttttttttttgctcctttttttcccaacttcttgctttctattggattgttagggatttctgtttttcactttatttctctctgcttatttgaaagctatacagcatggttttctttctttagggatcactcttccactttactttttaaagatggataaattttatrcatttaaaaaatttaatctgtatttrtatcttcttcctgagtggaccttagcatgttataaatgctcactgaataattctcattgttaattagagtttggttttatttttttaaatgcaatgtacttacttattttagagtaaacagttaattaaatctatattttacttgtttttttttctcttttatcctgttgcattctcatggattcatttttctttttttgttattataaattcagggggtacatgtgaaggtttattatatagacatattgtgtaatgatgaggtctgggcttccagcatacccatcacccaaacagtgaacattgaacctaataggyaatttttcaatctttaccctcctttaaccctcccctctttttggatttcccatgtctattaatttcatctttatgttcatgtgtacccattgtttaggtcccacgtaaaagtaaaaacatgccgtatttgattttcggggttatttcacttaggataatgacctccagctccatctgtgttgctgcaggagacatgatttcactctcttttatggcctcctagtatcctgaactcatttttctacatactgaggtgtatcctcaagtaattgattcaacaatggtctaagggtgggtggctttcttttaattttagttttgaataatactttagctggacataacagtctagattacaaattgttttcttctcggcasttcaaagatgttatcctattgtcttccgcctaggacacaataaacaaaaatatttttgaatgaatgacacgttgttgctaataagaatctgctgtcagtctgtcggttggtcctttgttagtaatctgttttgtctccctagtagcttttgctacttacttaactttgtttatagtctattatgttgtatctaggtattgattcagctttatttgtcctgaatcctatgtaggacaaataaattcttgatgtcaagaattctaactttattaaaattctcaacttttatatctccaaatagggttgccttgtctttatgtgcagtccccttttctgcaatttttattagatagatgatggagcctctcagttgttctgtgctgtctgctcatttcagcagctttaaatttcctttctcatgttttaaatttataatgcttwtatctcatgttctttttacatttctgccagttgttgtttgcagaagttttacttttgagggaggaagacaaggaactttcccccttactacctatttgaaaatcctaaacaaacttccataaaaataatttcatgtggagaaaaattcatgtttaaattggtcgatcttgttcactgtatttcttgggattagaatgtatttctgtgtgttttggaattttggtgtgctggcttgtatttgagttggaagattccagcaaaagtcttttctttcccccacagcatcttttcacattagatgaaattgrgtatgagatgggaaaatgagcaccacacgagttcagtttcatggagtcatcctaggtgtgtcctctctactgtttgagctcccttaggctcatggtctcaggagccagattcttgcctgctctggacgtagaggcccgagggcccatggtctctcctctcttaccactttcccatttcctgcctaaagatgtttgccatatttaaaagatatcagttacagccctatgactttgtatattttcagattgtgtttatcattgctatggattttgagccagagggcttatgtcagtgatcaaatgtgtcatcttgtttggaagcaatttgactggaagttgaggctagacttggggaataactgctgagaaaaaatttaaaagggtaagcattgattattgatcaagtgactatatcatttaatattcacacycagatacctttgagagtgacagaagacattattagtagtgatataggattataagtgtaagccagagctattataggaatgtagaattgtgtagtcgttgtgctataaaaggactatcctctttaaatttttagaaaggaatatttatgattcaatatcacagttatttttattgatgtctgtatgctacctagagttacaagacagctttttctataagaaacacatgattattgtataaatataaaggccaagagtctttgaaaacatggagtatggagctgagaaagaaatgtgtgtatgagtaaatctgaaactgatgttagtcatgaagtttttcagcaatatgtaccattccctctttaaaatatttatagtattacatctcatagtagctgggcctaattttccaaaaaacagccagaggaagaatgtcagcagtaggagttaattttgaggtaaagttgatgggcacattgtatcataagactatgtcttaactactataacctactataattcctaataaatcttgtaaataagcatatatgagaaatttatagtgtttatgtcttgcaaatacagaatgaaccaatatatagaatttgaattacctctagtaaaagtaaaggttcatgttatgcaaacacatttcagactttctatgagttgcaaaacttacatgtgtaccacacctgcctacatgttttgtcactggtgagatgtgacaaaatgatctctacttaccctatctttgaaagcccatgattttagtgattgtttctaaatataaatattatcagcttctcaagacaaaattcattttattctctatatctatgtctatatcagtataaaatccgtgtgtgtgtgtgtgtgtgtgtttgtgtgtgtgtgtgaggatcaaaaactcatgatgaataacaggctttaaatttttttattcgttagcatatttccccaagccaacataattcttgtttttctctttttagaataagctcttgccatcatgttggtcagatagaagaagagccatctcatcttttgtttgttagagggtttcaattatttaataagagcaagtaattaagacattaagaattaaagtggctccaagaagagctctgagactcagaactgcagagtgttgcctaggtttctaagtttggatttcaacagaagtgtgaaaagtttctgctgctgcttccttcaaaaatttttaataagatgtagtattttgacatattaatctgaattgagactgaaaaattgcgtaaactttggttaatcagatcgattgtcaaatccagctatattgctgtttcattttctactaaaatttgaattattcatatcaccaaatagctcagcaaaaatgtttagtttttgcatatatgtaataaaaatagttgataatgaggttctaggggaagcaaggattttgggtgtgtgtacatatgtgtgagagaatgagagaaggaataggaatgtatcaggatagaatgcttctaaaacctcattttccagtaacaggtttgatatactactgtggtcaaaaataataaagaaactataatagctatttctgtattgttataaatgctgaagagtcctgctctcagattacaagatacgcctcaaggaagaagtagtacaaacacaagsttcttaatataggtccataagaagtggcatgatgtaatatctggatatctgggtggtcactcttatttctcacacaataagaatgaactttttgggattaaaactcactctccattaaatttttagaatttccatctccatgtgaagaagtttgagtattattgatttcttcttctttggaaaatcagcccttcagcttttcaaagacaacttgaaaattggacaccaattcatatataatgcatatatattctccactgctgtccaaacagtcattttgtagcttcatagtagaaaatatagttaaaattcttaaatgagggaaagcacatgaattattatatagtgcatctctttatatgaccaaaaattatgctgtattctagcaatctggttatatttttgaatagtatccataattacaatatttatttacaattccatttaagctcctgtaattttgacggaaatggaagaaatttagaatcttggaagatcttaaacttctggttttgttggttgtttgttttctggggttacttttggccaggaggcagagagaagtgttatatagtacttgattcagcaacattctattttcaagtatttattattttaaaagtttttttatgtattatgtacaatatataactgcaattcctattttggttttatgaattattttttctatttttataaagtaaatctataaagttattctattatgtgtctgaaatattgagaaagaggatccttgtaaaagtggaaagataggagaccaataccaggttgtttctctgatccaggctggttctcagcatagctcaggaccctcagtaaatgcctgttgagtggaaggttgcatgaacttcatcgagtatggattcttaaaaataataataaattaaaagaaagcttttcattgggaaattggtatttcaaaaaatcagattaataaatccagtcttttctttcaagttttgttagtttttcttgaaaatttatggagtatatttcagaagctattttttttttttttttttttttttgagacagagtctcgccctgtcccccagactggagtgcagtggcacaatctcggttcactgcaagctccacctcctgggttcacaccattttcctgtctcagcttcctgagtagctgggactacagtcgcccaccaccacgcctggctaattttgtgtatttttagtaaagacggggtttcaccgtgttagccaggatggtctcaatctcctgaccttgtgatccgcccgcttttacttgagccactgtgcccagcctcaaaaactattttgataraggtggtgtaatcttctaaagccagctggcacatttataggakgccaggctagcccatcagatgaagtgtmcattgtggcagccacagatccacatcagatgggaagagtgtgatcagtgctgcatgcatgtttaatcaggtaacaatgggagctgtacaggaagaggattattattccaagaagaaaggacctatatcatcttgtggaaggtaaacgtatccatagggagggaaaaataatatatacatagggagagagaactgaaatatcatcttattggtgtaaaccattttgttagtatcagcattattattgttgatattcacatctgtatgatccatctgatcaggatgggttagctgtcaagtcatcaagattgactttatgacatttttattatctgtcctttcaaaccttatggttctaaattttcactgtttgcatgcactttcatgtataaatctgcatctggaaagactgatatttctctaaggcaggggtcagcagatgttttttgtaaggggcaaggtagtawatgttttggaccatagagccatggctgcagttacccagctctactgttgcaatgaaaaagcagccatccacgagatgcaaatgaaaggtgtagctgttagctttctgttggctcagctgcacaaataggagcatgaaacaggctgtagtttgccagccactccttgccacatcctcctctgtcattagctacccgtcttggggttcgttctgctgtatgctgtatctacaggttcctgtttgttcctgtttggtggtctgcctctttgcttcttatgcctcactgaccttcttgtaggagaagcttgtggggacttccatacatctttcaagttcagatttgggaagatgtgtgtcacctctgcccttctttcctgttcctcacatatggaggcagtgatgcctttcacccttctggccagagcagcctggttccagagccagccttgaccagagcttgacccatgctgggggaacttagctctggaagctggcagggtgtgggatgagtgactggtgccaggtaggtctggggagatagatagatagtttgataatcccaaatcccaaaactgaaatgctccaaaatctgaaactctttgagcatcaatatgactgtcaaaataaatgctctttggagcatttcagattttggatttgggatgctcaactggtataatgcaaatattccaaaatctgaaaaaaattggaaatctgaaacacttctggtcccaagccttttggataagggacaacctgtatatacagaaagagaactgaaataatgtgtctttttggtgtgtgttattggtgtggaccaatttattagttatcagcgttaytattgttgacacccacatctgggcaaggctgtgtaactggcaaactggaccctccaccctctcgggttcacaggcctttcttcctctgcagggagtgggaccttgccggcttgcctggacacagggaccgattgttccccagagtcctggattcccttcctcatcccttcaccgtgactgaagtgctgctcttaatgggcagattgccatcaactgactctgttctttaagtaccggtgacgtcgtcatcttccatgtgctgcccaattacatgattccatctcttggccgttactaggctctcagaactggcctgacccaaacctctttgcactttcttgccaccttccatccctcctgcccctgtgccttgacctctcgctgacccttgttcctgagggctcttgccttcactgtcagaccagcatgagttttgycaaaatacagattcttttcagtggagtggtatataatttgatttttttgtttaaactcctacattttatagtcattggtagttaaattacaaataaatcttacactaaaatttattttattttatttttatttttttgagacagagtctcgctttttcacccaggctagagtgcagtggcatagtcttagctcactgcgacctctccctcccaggttcaagcagtcctcctgtgtcaccctcccgagtagctgagattacaggtgcccgccgccacgccagtctaattttttgagtagagacggggtttcagcatgttgtctaggctggtctcaaactcctgtcttcaagtgatctgtctgccttgacatcccaaagtgctgggattacaggtgtgagccacagcacctggtctttaaaatatttttttaaggaaccttatcatcagtgctcaaagatagtcaaaataaattaaagccatataaaaggaccagtagggcctcaaattggtcatggaacatagggagcaatttgaaattaacaaaataaaactaatgctaactggattgtttttccccgagtaacaaagacatattaggaggatttctgctcctaaattgtcttttaccatcctagagtcaaaatgcttgatccaattcagtaaatggaattgtacaagggattagtgatgctttaccttttatatcagaaaaattctcagaagtacacgtaagtggaatttattcttttattataaaatcagtctatagagactccttcctatgtttacggatgagagagaggaaatgatagatgcttaaaagattaggtaggaagccactgtgattgtccagatgatagcctgggcaggatagtataagcgaaatggaaaaaattcttagagactatagagtcgtcagtgtcactttcatatgggccaagttgataaacttttaataaagctcaggattatttacataaccagtgtaattctctgggataaaggtctgaataagttagagtctttgggaaagcaatcttagagcagaggctaagagcagtaccaagaagtcagactacctgatgttaaagcctagttctatacctaagtatgggaagattatttaacctttctgtgcttagttttctcatctttaaaatagttcagtgaagaatcaacaatatcatgcagttgattatgtgaggattaaatgaaacaatacaaataagacacttagaacacttaaaatatgttatcactattattattgttattatttggagtcacatacacatggttttaaatcactcctccaccatttgctagctgtgtggctgtcagaaaattaaataaactctctaagtacccttctctttattgtgggggttgattgcataggatggctttagggatttgttcagatcaatgtaagtaatcttctaacacgtagactatgctcaataaatggcagcactaattttcattttctaaagagaaaaatacttggtttaaataacctgattgattttaggtagagaataaaatatatgtagaagtgaaatctatctactatatgtcatttcttcaaaattaatttaagatttccttccactggcaaatatatttaaatgtactgactaattaaattcagtttagtattttgtatggatagacaaatagatacaaacaaacaaacaaaaaaaccagacaaatgtatatataaagggttgtctctccaaacccaatattgataaatttttaaatcttgaagatggatcattttgatgaaaacacaggtttgcagaagatactaggttgttatgggtaaatgtctggcttataaaaatggtactggatattcatgcaaaagctcccatctgatattaagttaaacaaatcgaaattaaattcatttcaacaaatagagggccacctgagtgcaaagaaattttcccactcagtgtgtttctgtgtatcttttttaatttgtctaaatctttttaaaacttttaagcagaagcctctsttagggtaatatgatccttcactttaaatctgaagttaaatttccttttatttgctccaactgtacatttctctggtgtcaacaacaattaattstagtaaaatatgatttgatgattcttaggtctgtttttatatcatccaaactttttaaagttgttaaatttttctgaacttattttttccaatgtgtattttcccagcataaattggatccacgttaatagtcttattatgtgctagcaaatccatgcccagtctagagtgcaatactcccagtccgttgagtaactactatgccatttttacaaatgctatagaggaataaagaagaaatgataatgtgtaacctctcatgaaagagatgaaattctggacggagaatttgaaatcaaatgacaatttttgttgcatagttttgttttgtttttgcagttttggtaaacctttgataccatgagtgtttactacgagtgaacaagtcacaagcctcagttaatacaaaaatctcagaaatagtcattattggttgaataattaacctagattatttctgtgagaaatgtggatgcccatgaatgatgttacattgcatatgtcttctagtaaaactgtttctagttcataccaataaaatgaaatataatggtgcttggtgtttctcaaaaggcctcatatttccccataaataacctgggtctaacatacttgacatctgctgttgtagtartgtacaatatatactcacatataaattggcatggtacaaatcacataagaactaatargaattatttatagacgtgaatggtgacgtgatgtcaaataattctgaagtggtgtgtttgggatcaattctaaaggagaaggaacatgatttgtcagaaaaggaactcagattgcataggaatgaacaagagttgtctaagaaagatgattgaattgggtcagagccaggaacttgaccatttaatgaaacaatgtacagtgaggcaggagagcaggagagaaaaaagaaaaggaatggaaggtctcaagagagttgaaaagggtatctataagaacttactaattgtagcagctgactaaaagtggaacgagcttcctagcaaagttgtgatatccactgatagagataataaagtcaagagcgtctccttataggatgttgtttacggaattcatacattgggtagaagacaaactagatgctttctaagatatgttccacctctgaaatgctgtgattctcctatttgtattgctaattagccaatgaatatagtgtgtgaaagatatgacagcacaawtgattgctctgtaattataaattaccccctctgctaattacaatgaagttttttgaagattttttaaatgaagcagtacayttctttatgggaagatyatgtcacattttctaactgattttgtaaatcccatttaaaaaatctcctctactattagaaatgacaaataycaaaactacaattttatactgagatttatatatatatatatatatayacacacacacacacacacmtacttttttgggggggataagaagcattaaaataaattaagtagaataattaaaagctgtatgtttagctggtaatttttggagtggcacagattttgttatacactgtggtattcaaaaaagcccagatttgtcccaagtaaataaagaaatgtcttttaaatgttttcacctctaaaagtctggtttggtggttttaatattttcttatgttgctatatcaggatatgtatcttgtgcaaagtgtggcgagaacagtatgtttacatcagtgaagtatgtggtaactagaagagcctaaaaattgtgatttatgttggctgttggcaatttttttttaaaagtacattgactttgtgagaatttttatgtaaataaacaaattctggttttcatttctaatgctatttgattattttgtataaccaaacgggkttttttytttttttttttttgcaccagaaccagaagtagtgtaatgattaatatatcccgcctcatacttattttaaagttgaaattttaggtttttaattcaaagaccccattgtattcttatcctataaaatgaatgggctctgtgcattaaaatttttaccaaatagatatggttttatgaaatgacaaaatgactaaaggatggctcaaaatctctaatggacttttaaaaatttgtgaaatatcagaaatcttgggaatgtatgactttggagaaggataatgcatagtagtgatcagtatcatttattatcagcagaatggcagaacccaataaataattcactttcttaaggacctactgatrcctagtgaatccctgtgtcatcatcagcattatttaaaagatggcacagaaggaaacatctgggagccaattcatcatttaattaaattatcctgtaatgaaatcttctgtaatgagattaattttaattattaatcaggagttgacatgggcacaaggcatcattaataataaatgaaaggctttgtctgttccatttctaagaaagracctagtttactgcaacggtgctttttatacagccatgctgagtcctcacaatgtggccatccaagaagatggcttgatttttatttcagaacctagagagaggataattgaccaataccttcagatttggattccaaattgttgaagcaatttttgattttaaaaatatttcaaggatgtcaagaatagaaaatgctttttcagagtaatttgggggtaaattcctaattcagggacaaaaatgtcgccttttagaggccaaaaataggtaatgcagtcacattttggtatcagctataggtatgttattgtgctcttgtgtggatggtctgtcagttcctgacctcaccccagatctgccccagtggggtcactgcctccgaccagggttatatgggtaataaggagacggcaaatcagtggacttacttataattcagtgggaactcaacagtkycccggaagtactagctctctgcgtggtcaccaaacagaagccttcctggagactctggccatgtcgcccaattcttgtggcttctcctttcccttagttgcctgaatggaagatggccataaagaggaggcttgagtcttgttctttgaagccaaggaaatcagggttagggccaaagtaacaggaaagcagacagagggtctttaagaacaaaacaaaacataacctgtttgtttcatcacccttaattaaagttcttctttggatttctaattttatctgaactaaactctgaaatctttaacaaggcttctcccactccttcagctttatttcagaacacccctgctgtgcctccttttcccagtttctgtcacccctgtgccttctcctcggcctgcatattcattgtgctatactctctgtgatattattttggcaattggaaagtgccaagacttcttccactttgaggctttctttttttttgagaccagtcttgctctgtcgccagtgttgccaggctggagtgcartggctttatctcagctaactgctacctccgcctcccgggttcaagctattcycctgcctcarcctccygagtagctgggactacaggcatgtgccaccacgcccagctaaatttttttttttttttttttttttttgtattttagcagagacggggtttcaccatgttggccaggatggtctcaatctcctgacctcgtgatccgcccgcgttggcctcscagagtgctgggattacaggcatgaaccaccgcgcccagcctgaggctttcttatttgcagttgtttagtcagttcagtttctgctgctttctcttggatcttttccagatgtgctcctaggcatcctttaggccctagcttagatgtcacttccactgagaagccttcccagattcccagtctaatttcttccagtttgttatattctctcatgacatccattgattctttcaatattgtgctaaattattttagacctaccatgtgccaaggcttttgctttccttcctataacttatcaaaatatataattatatagtcatcctctgtgattattgatttatctctcccactagactgtaagccttgagaaggcaaggatcatgctgaaaccttggcaccatgcctggtacatagtattccttaatgaatacttgataagtgaatgaaaacaacagagatgagaacgtaacaatttaatctgtcagacacttgaaggagcccccttaagaggcaatgcattttccatgcatggaaatgtttaaaaagagactagacaactctgtgttagatttgcctccagagagaggactgacacatgagaaaggaaattgaaatagatgaccataacagtttactctaattctgtgtggtggtggttccaacagctaggaaataatcaatcaatagttgcctattaattgactaagacattatatctacttggtgacagtctctcaatatttgctttcttgaagaaattgaatattttttctaatttattctttaagcatttattcagagtactgtgaaaactgagacaactggttcaatattttagccacagcaatgtctaacaccaaagaatccctgggattctttttttccttttattttataccaattatgttagcaagaacacttaatatattataatagtgatgaatgtatagaaaagggaaaataagtaacatgatcattgtagtgagtaatatctgattaggttgtactgtaaattttgaatgttactactatgtaaagacaaactttttttcagatagctaagctaatcttgccttctgaaaaaaggtttttttagggtaaggaactttactggtgggctctatgtatactaaggaaatctttcttttaattggtaaaattccactgattggtaaaattccactgctctcagctatstttcaatcttgaccacttastgtaattaaaaagacagagcagaacaacattgagcctccttatagttctccagcccagtttgccattcagtccgtgaaaatgagtcagtcttggggaggatatttcccacatggcttaataactttaaacttacaagasaacagaaattcgaattagcagatgcatatgctaaaagaaaaacatcttttttaaaaaatccgattttaaagactaaattgtctgtgatgtgcctcaaaggcacatagggacagaattcgtgtaactcctcacattcttgtgcctgagagaagagagtcaaaccactagtgttttggaaccagagatttaaaacagcctagtccagaatggaacttttctttcaatgtgatttgttcatttgcaggttagtggtaatagtaagactgtcacagtaggatttttttgttgttgttcttgagggatatctggaaattgtattagtaattgtgattagcaggctctacctgaatgtattttcctgctaccatgtgtctagttggcatgtgtcaccagggctgaacattttagcacaaactcgaagttgtattgtgtttcagtagttttcctacatgagtctgcatttgccaatctacctatttgatctctcttagcaaggaaaaaaagaaccctagtgacctgcaccaaattctttataaaatagactattgaaaataagcctaatgaaagcttattttattaaggctgtattatgtactctgaagatcttggtaagtattagtataaatattagaaataatacctatataaagaatattttatgatccagttgtctttggttgaaaatttgcttttactgctgaaatttaaaaatcaagccagctacatatagctacaaatagctacrtatagctctagctaataaataatactctttagctagttttaggaatgagaagtcatcaaagtgctaattgaccatttgatatagcttttgctatggtacaatgtgtttgttaggtgagagaattcttattccacaaaagaaaggataattatatttagctatggctgatgacctggaagaggcctttttgcatttccttttttcaagatagtttattgatctggatcactaaaagaaaattaaacatctgaaaaacaaaaaactggaagaactgcagtagtggttcagcaatgcacctgtgtatacctagggctttgcttctcctttttggctaattacagaaggactcaacaataagtgctcaagactttgattgctagtttatacatctttatatacactttcattctatctttaaattgtcctaaacataagtgaaaataattagtaacattattcattgggttcatttaatttgttcaackgatatttattgaggatcctactaaatgccaggcactgttcctgatgaacaaatgacagactctgttcttgccctcatgttgcttgcaatcaagttgttaaaagagggataaagcaaataaccatgcaaataagtatacaatccaactgtcttaagtgctgcagagttaggtaagtagttaaatggtttctctgaggaagggattgattgaagactaaaactaataaataggaattaagtaggaagaggttcttggagaggacattctaggtgggggaaataatgtgcacactctgtagcgggagggagcatggtgcattgtgaatggaaccccgaaaacaaagtgaagcatttgggtgcagtaaagctgtgcgggtaagtaggggccaggacatcaagcacttgtaggccacatttagggtcttttttgtctttgtccctagagcaataggaaagctttaacaagttagagagacagtgagtgagcattgcttttagcaaaggtgactttggctgtacttgtagaccataggttagaggcattaataaaggataaaacataatgattgtgatttattataacacaaatggaagaaattaaaattcatgaatccaaaatgatgcttgaggattgggtagggtagaggaaagctctgctttacagaaaaatgccaactattataaatagaaagaatgatggggtgtcaccatttttgcagttcccaataggataactgatcagggtgtcattaacagatgctaaaattgttagaggaatgtttttggggaataatatagtcctgtggtgccaaaatcctgctctaaagactgtttactaataagagaggaaaaaatgtgactttacagtgataatatatcagagtcaccactttaatcaagggattagatttaacttcacaattagtggtacagcctggtatcacagattgtgtgatgtgatagaatatggagtacctaaccttacaaaggaagtgtttctacaaaagaagaaaaaagtcaaacctgaccacaatcaagcctctaaacagaactctgcgtctgtagagaatgtaagaaatggaggatgaattaaattataccataaggtgagacattctataagaatcctagagtggatatttcagacaagattaaagacatgcaacagccaacaaccaaacaaacaattgtattttggttttagaaagctatcaaagaccttcttagtacaattggagatattagaggattttatggtattgttaatttttataggtttgataggagatcatgtatgtttactggtgaaatctgacatatgcaacttatttccaaacgatttaaaagcaatgatacatataaggtacagataagatacatatggaaacatgttaagaactgtggaattttggaggacaatatctaagtgttcattgtactaatctttcaatttttttgcatctatgaaaatttttacaataaaaagttggagagagagagtagatggcaggctgggtagttacttgcttcaccctatgcatctggccgaaaacagtttctggtccttggctaactacagctgttgggtaaatctttcaccaacwcagaaagtcaccccaacatctaaaatcccaatctgcgaaattctccaggttctgaatacatgctgtgctgacatcggcagcgtaaatgtgtgttgtgtggtctgmgtctcagtttgtggatacctccagcgggaacctggggcttaargttgaatagtgtctgtagcagagagagtctttgtgcttgatttaaactacacagaatggatggctgtggaacaccagtgaggaggctatgcggtagacctgatagcagaaaatgtgatagcttcataccaggatgctaggatgagagagagaagcacaagatatgagaaatgaataaattttaggtggtaaaaaatgactggacttcatattatattgttaataggggaataagacagagagggatttaatgcatgactcgctggttttttatttgtataaatggaagaatgttggtgtcagacacagaggtcagaagtctgaaagtgggcaagtttgggaagaaagatccaagatttggtattagacatcatgggttttgcaatcaaaatggaaatgtgtcatttgtatatattgggtagttaaacacagcttaaatggaaaaacagaccttcagaaagtactgtagtacattaattttgcacaaagtagcactaatttgatacrcatctctaattgctctcacttaaagcagtttcaagacaaataataaactctttttaattgcaacgttgtaaaaaacacttttctatgctgtttattctctaggaaactatgctatataaaaatattatataagctattccttttccagaatttgttcagatatccacaaactgagactcagaccacacacatttacgctgccgatgtcagcacagcatgtattcagaacctggagaatttcgcagattggggttttagatgttggggtgactttctgagttggtgaaagatttacccaacagctgtagttagccaaggaccagaaactctgttttcggccagatgcatagggtgaagcaagtaactacccagcctgccatctactctctctctccaactttttattgtaaaaagaacattcattctttgtaggagttagaaaaagctaaaaacttactttagagcttactttgtgggcttaccatctagtcattagcttaaaaattaccaaaatatttctaccgcaagtaatagatacccattttagaaacattgaaaatttttaatgagtaaatagaaaaaaaggtcactcaatttaatgagtaaatagaaaaaaaggtcactacatcaattggcatttgatgtagatagtttgtactcattttaaacttaaaatctgtttgtgccttacatgtagtgaatgaaataattactttttgtactatgtgtattttactatagttcttcaatgagaggtaactagatggtttatgtcacttcacttgaatgtgtatttatattccaggatggctctgtcaggaagttttctacttatttatagtgataacaattcatacaaattaagccttttatttttacctctaggagttagatatcataatcattcagcctctattaaatctatagtcacagaaaaatgatataaaaccatgaatcctgctacaacactttggatgtgttgtacttttacccactgtcacaaataatttaaaataatttctaaggaaacatcatggcagccccagttggtggtgcttagtgtttaactacagcatgatgactacagaagaggtaacaattttagttcttgctaaaactaaacaatattacatggatgcacatacacataatacaattcagaaaattatcaccaattgcttcttttttttttttgtcttctcagaaatgggcagatggattatgtactaaaaatataaacccttaagaatcaggtttatcctgtaaagaaggtgrtgtctctgggcatcacttggctcttttgtaaattgattgtcacttcatttttatcgttatcagtaaaccttattaggtgctgaaatcagtgctsggggtgcagggtcaggtaaggaaagcatgtgctgtgtatcaggagacctggccacaaacttgtcatatgtctctacataagttattattgatgaaatcattgtttggtgagagtttggatagcctgtatagggaactagctaagtagttgggaaaaggaactgaagcaggacaaggtaataaagtgcatcaagatagaccccaggcccatttggttagcatctctgaaggagacaagttcaaataccaagctcaaagagctggtagaatgagtggagctgtatattcaaagtacctaagcagttgctatgaataccagtgtgaggttcactgtttgcctttaaagaccagcaagtgtgtaatggttgcagttaggtcagactgtatggatagaggtagtacagagccattagtggaagaatattaaatttgtttgtttttagaattggggaaatatgataacatgtgtctgtaaagcagaggttgtccctggagaggagaaggaaatatgcaagagaaatggggggaataagttatacttgcttattggaaaaattaggctctgaaaggatgaccatggattcttggctgcctaatgaaacacgacagccagaaagggcctgtggtaagtggtcagggcagaatgctcaatagaattgtgatttttgaggtgataagaagagaaaacattgtatttagagagggactattaagagttctaacttggttgaactcttggttgattaataacaagttaggacaagtccaggtaggtgtttataggtagccaaagtggataaaaactgggaggacgctgactttgaggcagcgaaggactgtgcttacaaggcagaaatgcttagtaacatgatgtcaaatcatcagggacggtggccaaggatggattacagaggtgcataaagtagttgctaaaaacaacaagtaggtttggaagagtgctcctgggcttgatagaatttagcaaccagtaggggtagaggttagtaytaatrtaagtggtgaaaagacttaaaagagaaggggaagttacgtcacactatcagaagtaatcatatccattacaggggttaaaacgaaattgtctctaatgttaagactatatataggcttaatgtgttaaaacatgggcaaaagtcattccatgctttttctgtgtactagagggactgtaggtatagacacagaaaaaccatttaaaagtgaagcaacggatggtataatcctgtgtcctgttctttgccaaattgattttggactatccctctgaatgcaagaatggttcttctgctgcctttgcctcttttcacatctacataaagtagtgcttacatttgtttggagtcaaaaaataataaataaatgaacaaaatatatggcatgtcagatgatgataagtgctacaagaaagacgcagctgaaaaggaggtgagagagaattaaattagggtaggtgagccccattgataaggtggtgtttatacagagacttcatagacatgagaaaaggaagtgtatgtgtatctgggaagtgagcattccagggaaggatgtgcactggccccaaggcagaactgtgcttgagaacagaaaagaagccaagaggcggcagaggagggaaagtgaggagagggactcgaagctgaggtcagagggagtggtgaagtttttgatatcaagccctgtgggccaataaagaccttgccttttgctgtgagtcatatggaaagccactggaggataagatcagaagagtggactgctgatctaacttttcgaaagagtccctctggctgctgtgtgaagaaaggaatcatatccaggctgctcagcctgtgccactgagcagcctgaaattagaaggggtgggaaggagcagttaaagtatggatgtattctgaagatttagccaacacggcttgctaatggactggattttaaatagaagttatttatcatggagcgcaaaacttagaaaatgctaaggtctagcttctatgtttatacttgctatggcatagaccctggacatgaaccctgggtttgaagacccagaacatgcattttaagagaagatcttccaaccatccaaggaagattctgcaaattgaggaactgagtaaacacagcaaacagttgcctaggctacctgagggaatagttcacaggttaaagtagaaagaatagttgctttgatcaaaatgtggcatgagaataaatcctggcttttccacttacctttaaaatttaaattaccatataggttaaattcattcacctgtccatcaaatcatttatccattccactgacatttagtggatacctaccatgttccaaacactttgtaggtacgcaggaataaagcatgaacaaaacagatgaaaataatctgtgaactattctgagagatgtggataaaacattaacagtggagccctttatgaaatccactataacattaaattttaaattccagctggatttagctttatggacttccaaataagaatagcctaataaattctagtttaaaggtgtaacattgaacagaatttagaaaattcttttctaatgttgaaacaaaggacttttgcaatagttgcattaaaaaaaaaacattgactcacaaatgaatagctagtggagggcaggatttctagataagcaggacaaacaatctccactgtttctcaccaactatggagctaatggggacggtggctttaagccaactaccacttaaggggaaaaaaaaacttaccattcaacaagtgaaatagttagtgtggaatggatagcatctttgaaatttgattttcagcagtctcnccaagtgactgaatacattttttcaaactatttacttttgtatcatgtcttctcatggtcaaattcagsatgaattttatgacaggatttggtctaatgctgctgaattgtctcataaatatcttgacaagtcatttgaaacatgctgggcctctaaagaggctgactgacatgaaagcactaacttggaatcatcagggcttaagggtaacttatggaccctaaggcagagccccaaatcaagatcataaaattacagacagtgagttgaaattgagaccagtctagattggtaccagcttctttgggtttcttcggtagcagggtggagtcaggtggctggtgccatggaagcattttggatctggtacctactggctacaattcattgttagattcaaggatgtgtccaggctttgggaagcccttctggggactggaaagggagggtccagtacccagaagggcttcccaaagcctgggcacatattcagagtccagccaagtgggctgaatttcaggacaattttctgggtccatccaagggaaggaagcacagattcagatcggaaggtgtagcaagggacaggaaagcctgttttatagtgagctctgagctttggtcattcattaccaggattacctgataacatggtatattgctgccatccagtttaaggtacacactgccatatatatatatatatatatatatatatatatatatataattctttatatttctctgggcttaactgaacttagcttaaggcacatgaatttatcattcatacaataattatttagcatttttatatctgggcctggctaggattaacaggtattgacaaagaggatttgagatttctgaaatctttatttagcataacctaaatcaacaactaggattgatagaaattaaaaagcactgatttattttaaaagtgaaaatttctttatattttgatgcaatattttaaaaatatggtacagatttgattcctaggtatttactaatagttctgcattttgaacaccattatctatattaggcatattgaccttcatgatttttgtacaattaatttttgcttaatttattttctaatttatagagacgtgaacagttgccataaccatgaacatttacagatcaatggctattggagttatttaatttatacatggctcagaaggtggcaaccatttctttcaaatgttatatggacagttctagaatgtatgcagatatcctggggaaatggaggggtgggtttctttacagaaaagaatgacctgagatcaacctaacaaaagcttggttgtgaagaaatctatcagaacaaaattgtacatatgaaaagatataattcttgcatgtgactcctcaactgtatttaccaggatgaccctgtgacctttcwtttactttagattgattgttgatttatttcttactcatttgttcacacttttactctgtccccaccctgtgccatccttgagctcaatgctttctcttgctccactttggcttggcacagaccttgatctgatgcttgaactcagcttcacctgctatcctggatcactgttgttgtttttcattcctcggtgcttcccgagttccctagcagatagcctcmccctagctcaacaataccaccaccaccaccagcacccccgccaccaccccccccacccaccccaccacccttgaccctctccatacacactctggtagactgtttttcggcgtccttaccttgataagcttaacaaagactaataataacaaataacacaccacattactatttacaaagtgtttacatattcattttcctgtttgagatagtggttcctgtttcaaaatagaaaaggaagagtgagatatgggttaaaggaggactatgtttttcataaatatttacacatatttacatatgtaaaagtccacataagtgtttataaatatgtttcagtgataggatggaaggtcaaatatatatggactcttatgatatatacaaagttttatttgtttatcagaaaaatactgctctgcaaatcttctaatttgatagccatttatcaataaattgtattcattattgaggaaatcattactttggtgatgtttgtcatatctgatttaaaagcaacctcttactcttgagaagcgagaacaggagagtgttcattcagtatgagtgaagatggagacagcaacccagagcatttataggagaaaggctggacatgttttaaacactggataaatgcaaggcacggttatatgccaagtcgcattggactggaagagatcgggagacccaagcctttgtctacatgacttgtctgacttatctcacatcttccatttctacatttaaaataggtgaactagatgtaggaccctgttatttcaaatatatgtgacaagagatatctatgcccctttccttttgaaaatatttctggtgtctcttgatatttgaaaaataaaattttacgaatttaagagtccaaaactaaatttcactgttatgagaattttgcttttgcttgtcaccataataacttgttatttattttaatcttatctggttggtcaaaacttcaggtcagctttacgatatatttgatatggtccatttatacttggaactgatccattgtaggtaataaaccaattaaggcagaaaactacccttagacaaagttggtatttttaaatgagctggcatttgaaatgattattttgatgttaatattatatatattttatacattatgcatttagagattatatttatgaaacatttcaatataacattgcatccaaatttgcatatagtatacataacccaaattatggattttgatacatattcttttaatcataccaaagttgcatcttttcatttactcattccatcttcagttgtttataacaatgtgaatggtatgaaattatgtgtttatataataattactccatatatcaatatcatcagaactgagaaacttattagcttatcttctagaaatgccattaatgccttgagattttcttctctctacttaatagggttaaatagatgccttccattttagaaaggaacagtcttattatttcttatttctgagaaaggactagatactccttgagatgtctgtaataaggtaaaattgttaactttcaacatgctgttttcctaactttgtgtatgtatgggacccatgatcttatctagccttttgaaatgaatcactggaattaagaaatttaaaagaaaaaaaatactgtgtaaaactatgctatgaaagaaaaattattaaatatgctcttttcatatagtttgctaattaaatactgcagctgttatgtggagggaaagttgcagatatgatgagatattgagtttgtcatttctgaagagttacatttggctaatctgtcttaacaaactagaattttccatacttttatgaggagtatgcgtagtaagtatgatgtatatatctttgcatagacatatgtacacaaacaagatttactaaaatattttaaattaaaaatgtaaatctaagacctgcatcctcaacctttaatttccaaagaaatataaattttgctgattatcaatctcattcaccttttctttgtaaataaaccagaaaacagcatatttagagagtacattcaacagcattactatttcatcacctgtttcagtaataaagtgacagaatgcacctttaaaataatactttggttgtatcttaaaaattaaaattgagagtaatgataattaaattgttaatctgtctgttaacttagtcaactataagaaaactgattttttagaaaggggtaaagtaatmaaaatagtctattcattagattctcccttaattttaaaggaaaagtctcttataatacattttgaggcatattttcctattttcttctgcacactgctatgcagtgcttaagagaaggtaaggacatcttttagagaaactgagtatttctagttcagagttatttgaatgctggttacttggagtggaagacttgatcgtgggcagactagcaattaaagatcatgaaagtctacactccaggaggcgatagacacttgacttgctcactcctttctcagtcaaatgccctccctatatgccatctgtgggctgtgtcaggcttagggatcctgaaggaaaactacttttggagaaataaatgactgcttgatatgattgaagtgattggtttatacgttagtctttttgagttatgtcatctgtatgttccagaagtattaaagtttgctttccttcttttaaattctagatctaaataaatttaattttggtcagatttggggctaaaatttgatatagtcattcagttttttttccccaagggataattacataatctttcttgacgtggacttagaatgtacagtttcacaggcttgaaagactagtagtcagacgaagtcgtattctgatgaacaaaccttcttaagcatgttctgcaatgtccagatagaattaataccaatccaaattcatttttctcagaaagtttattatctttaaaaatcttatcattagcaaccttgggatctcaaaattatagtcttagaacattctacaagtcttttatttgtgcagttccttaattactactatttctacaaaataactgctaatatttattgagtgcctcctgtgtcacttcatactaagtcctcctcrtaatttatttccttctgtcttcctatcactttcatctggcaggtatgctcattttcctgttctcgggcaataatttgccccaggtggcttacctggtgagtagcagaatgaggatttcatgtcctgttgcctggctgtaggctttgagtcttaaccacacaccgtaaggcacccagagtgtgaactttccatatgatgcagaccagctttctgtttctgcaattctgcattttatggaaatggaagcattgttttaaggatgatgtgtgaccaaattacattttaaaaatctttggtaatactgacattgtaaagatgaagatccagtccctgctctgtggagctccaggtttctggagagagagtttatcagataattgcgttgtgttatttcaacggtcaaaaaagaacatggcaattctgtcatggggagggctttggagaagaccagatgcctgagatcaagggagagcaaaatacttcatttttgtgtaacattctcccgtgcaactttgttccacatttcatgatatccttttcatatctaaattcacatggacttctgattgtgctgtgtattccaaaccatgcatttccccacagtttcattgtgtttgctttcatatgcttttccatttctctttactactatgtaaaacatgtattttactttattaggttcttgaggaagggtaattatcctttttaaatttttttttcaaaatatataactgcatttaactcttctttttctgacttctgagatttaaaatgtgttaattatacacttaaaatggagatttacagtggtaatgtacatttaaaatggtgattattcatgcctccctgtgtcctccccttttgttttgtagctgtacttaataggaaatacggaaaagggcaagaggattgcccagatttaacacagtgtctagtaacaattattgctaacccctattatgcattattctatgccaaacactgttgccagcatttttcatggattattttatttactcactttaactttatgcatagataactgttgttatgcctattttagagatgataaaaccaaggcacagagtggttaaataacttgtcccaaaatcatgtacctagttagtggcagagtgaaaacatgaactgaagaagtctgattctagatactgcatgtttcaaacttaattggggcttctcagcttggaggcaaatctgtaatttatgaaccggtcattcataaatattcagtaagcatttcctggctcacattagagaattatttttccgtatgatatggtggtgtttaaatgttataaaggggagcatattggataggtcaaagagtaggtcagaagttaggtgtacgcttattgaaatctgggttctgccataattagttgtgtgactttttaaaaatcagttccttccatccttcaagctctcagcttcttcgtttgggtgatgattaagtatcactccttcaacagtgagtaatgcaaagttttctacccattcttgcttaaacataaattttgaagccttcagacccatgtggtgggcactgttccatctccattacaaatcttcctcctcatctcttcaagtagtttttttttttttttttttttttttttttggagacagagtctcgctctgttgcccaggctggagtgcagtggtgcagtctcagctcactgcaacctccacctcccgggttcaagcagtcctcttgcttcagcctcctgagtagctggcatgcgccaccatgcccggctaatttttttgtattgttagcagagacggggtttcaccatatcggccaggctggtctcaaactcctaaccttgtgaatcacctgcctcggcctcccaaagtgctgggattacaggcatgagccaccgtacccagcctcaagtttttaatgttggatactcctttggtgatctcatccagtctctgatctttaaataccattttttatagggaagattcacacttttatctccaacctagacctcttccctgatctgtagacatctaatccattggcaatcctgttggctctacccttaaaatataaccagaatttaataaatttctacatctttattgctaccaacctagctcagaggttcatctccatctcggtgattgcagtagccttctaacttgtctccttatggtatattctctgcacaacacccaaagtaagccattaaaagattaagtcagagcctgttgttcctctgctcaaacctggcttccaatctcactcaaagtcacaatctttacagtggcctttgaggctctacacaaacaggcccttagttgcacctttgacattgtctgttatctgtctcctcctcagttaattcaccctagccaaaatagcaggatgtgrtctttgaatgtgccagacgtatgcacctgcytcagggcttttgcacttactttcctctatgtctaaaacgttcatctcttaagtgtttgtataactcactccctcagccccttcgggtgttttccaaaatatcttttgaataaagctttccctgactacccattttataatagcattcattcctcaactgctggacactccttacttgctttactttgcccaatagtaatgaacattctctaggtagcataataaattttagtttttttgttttgttactcttttctgtctccatcaattagtatataagtgttatgagggtatagattttgtagatttttatttcagtkttgtatacttaaccacctaggacagtccttgacacatattatgcacttaataaacatttgttgaattcatgtatgaataaatgaatgaaagaatggcatttgagttttattaggaacttttatcttcttttgaaaatgatggcaagttagttttggtctcttattctgatagctggggcctatgagtgaatgtatgctgaaacaaaatgcctcatgatccaggccagaaatgtaagtgtatgaaatgctttgagtgcaaataatataggaatgtgggggctgtaataaaccacagggttaacccctaatcagtgggctacatctcattgctrtcataggcaaacagtgccttgccatttgacttagaagaagcagctgcaaatccagatttttatgagagctccagcaattcataaatatcgatttccaattcaaaattttgtgtgggtaaaataaaacatcttctagcaagattcaacttgtggactgccaatttgagagctctagtaaaagaagtataaacttcagacatctatctattttagcaaactttacctggtttaaaatgtcgtcagaaaagtttgtaaaataacttgagtagaaaatgtaggacatgaaataccaatcaaatcaagaatgtttgatgaagaataattcctagaatctttttgcagtgtttctggctccctttgccatttctcttgtttgctcttcattctgataagggcctgatctttgatgttgacagtctaattgaaccaaaaaatgaacaaataaaatttattgagttcccattatgtgccatgcagtgttctaggtgccagggttacaagaatgaagacaaaagtacaccttgatatgaaacttccatcctacttggaggggagagaaaggtgacagataatgttcaaattaactcgtgaaaaagataattttacatagacctaagtgcaataagtacataaacaaaatgttctgatagagaatgctggggttaggtgttggctagtttatactaagtggttgatgagggtatgtttgaaatggggacttttgagcacagaccagttggcaagaaaggcaaccgttcaaatatgtgggcagagcttctagacaatggggatatgagatgaagaaaccataaagctgaaaggaacttattgtgcatggagaacagcaaactggacagaggggctggagtgcagtgagggagagagctgaggtgggtgaagttagggaagttggcccctgtggctctattctttgtcgtttgctctctgtatctttttcgtacttcagtttgctacatcttcacatttgctgatcttttccacttcagtgtcaaatgtgctattaatccagtccaaagaatttatttttattttaaatgttctatattttagctttagaaattgcatttcattccatttctatacatttcatttctttttttgttatattcatgtcttcactagattcttgaatatatttatgataatatcaattatcaattcatatcaatttcttcagattatattatctctgttatttctgggcctatttctaatgactgatttttcttctgcttacattttctttgcatgacaagtaacattttaggagatgctggatatttggctgttgactgtctgggttttattgtcttttttatggagtgttaaacctgtttgagaaggctgttaagtaacttccgaatcagcttaaattttagaggcttgtttttaaatggtattatagtgaggctgctgaagcccttaatctagtgttagttttgtcttaccattaaggtgtgaactttcaggatctcagttgaatgtgtccggtatttagtgaggcctctgtactctggctggataaaatacaaatgtcttctagctccctgtaaactgcatattgttaagattacagcttattaattggccctttcttttgcacagtcttgttgtgtttcaacctatgtatatgcagttcagtctttagcaactatatagtgagtccccatgcagatttctggagctctctgtctacttagctgtgttatccccagtaccctgccctgcagacaccagacaccttaaccttccagaactctatctgactgcttaactgaggataccccctcccgcatcacagtccagaaagctactgtagacagacagttgtgataatagtgctgaccttctttgtttcccttctttcctggattacagtcctccactgcctttgtctaacatctaaaatcaaccatttcacttatttctctggatttctaaatgtttcattacaggaagggtgttgggtacaagttctttaacatggtcatgaatgatgttgagaaagattcttttcccataacrttttattatggaaattttcaaatgtgtacagaggtagagaaaggaacctaatgaacccttatgcccaccatccatctttaacaattagctacatggtgccaaatttgttcacctataccttcttcccagcctcttacccatctagatcataagaaagaatttagaagaatttaaaatggcaaaacttcatgctgtgttaaagaaaaaaaaaaaaacaggagaagatagtrtttattgaatctcttctttatttatttggtacttattcttgaactatagatctcaatctgttttattatcacagaaaccttacaacttaatctttttgaatgctgccaaatctattttaaataaagctttgatttgcatttttatttttgttgcccaaagctttacaaatagtctgatagtttcaacagtttgtataccttatgcatcatcttgtgtatacaatgtgattcatatcacatacaatgtgatttggttgcaactgataaaacacagtaacgtcacaattcattggctaccatagatttgaccagtaatatcttgttcaaaaggaagtttgtgttgactgttttttgttatgaggaggagcttaaaaggtaaacaatgaaacaacatggaaaatgttttaaaacaatataatacttaatattaagtgaaagaaactacacaacactttcatctacatttcataaatggttaagaatgtcatatacgtacatataaaattggtataacaggtaatttgaatcttaaaagaaatctagaaaaaaattaagttagtgatttttctaacagatatgtgagaatatattttttcttttaaaaatttatttgacactatttcatcagtaaatacaagttagaaagcattaaaaagaaaataattggaatctattgttaatggacatatccagctgacttaacttactaatgcatgatgataatgaggccagaattgtagctggattgaaaggagaatgacagaaacacagtcaaagccaagcttaataaaaggaagaatcatgcaagacagaatgaaagttggaaaatcagtcgcctgtagcaaaaccaacaaagttaataccactaacaaagcttcacatgtcttagctcaaaatatcatcagtgacaattgtgaagagttgatcatcttgtcccaacactaatgatatttcaggcatgtatctacaagttcaaatgatagtaagttcatagcttattatacttgaaaacaagcatatattacaataaaatatcactgtgggtagtaatttctttactttggaataaatttcacatgtaaaaaccatgtctgtaagttgtgctgagaatrtttattctcccacaatgaagataactttcctgaacaatgtatcatgatagttattgcattatcctctatgtctacttgacccataagtttctcaattatctattattcaagattctatttttaacatcttgccagagaacagcattggcatgtgagtatgcctgtgcttccatgctgtgtatgtgtatgtgtgttataaaatgatggttcgttagttctgttaggtgacaaatgttgagatgagtgaagactgtccacttttccttccaaattttgcttctaggtaagaatgaaagaaatgtcaaaccaaattctggcttacatatagatattttttgaacatttcttggcaagcaaacacacataaaaagtaactctatatttgttctgtaggatcaaggacactttagctcttatgtccttttagatgttttgaccattacctggtatgaaaactccagttgagataaacgtgaaaattccaagaccggattctctcaccttatgtctagcatcaggcaattagaatcttctgtagttcatgactaggcataggaatacttaaaaagacttagccaaacacatcctcttgaaagtgaaagctgcaggcttatctaatttttacacttgatttacgtaagggtggagagtattgctaaaatattttagtgatctacttatcttgagtagttttaacttctattaaaatgagatgtgcgagttcatttctgccattcacagtgctactcaagaggctactgttttcgtcagtgaaaacccatttctgacattaaatattctaattttcaaaaagttgtttgttgatggaaattcagataaccagaagacttttagtactcatgtgagggaaggtgggctttatgatgagaatgctacctttctgttgtcacatttttgaatagaatgctcatagcacctacagtgtagcttattctaagtaaaccatgcataattactggatgtgctrtagtatttttagaaaattgcagacataataactgcattaatgtttgtggtattaagaacaaggttatatatgctctagaaatccttatttacagcttctgtgacaaaatgtcactgaaattcttgagtaagtcttatataactatgaattccagagaggtggaagttgttatctttaactaccaggagtgaacatactaccagtaataatagttactgttattattattattattggacatcatggcagtgatggtgacattgttgaaaagtcatagcaataataattgtcctattagtaataatagaggaagaagataaagactagctactgtttcccgaatgtttactctgtgctatacgtttaaggttcacatgtcatttattcaccagaataactcaggtattgttattttatcttaatttttcggatgaagaatttcacacaactggtatgcagcagaaagggaaaacaaattctttgctctctgattctaaatatgtactaatttccattgcygtatattgcttctttttctgtaaaaccttttataagaatttccgtgaaaattttaaaatacatttttgttaggacttctggaacaagaatattttatagagaaagaaaggaagagttctttagtttattaaaaattgtgccagggaaaaagataaaaatgtggaaaactttatttctgtttatgaaggcattcagcttctgtttaaccaggtccattgaaaacagattgaaatgtagtgttttgttgttgttgttgttttttcacatgaaagtttgtgggaaatcttaaaaacagagtctttctatacaaccttgattttccccagaacttctcatgaagactgctgccacagcttttagacagtagaataataaatctaccttttgggtacatagatatcctagtaaagattcagataaatggttttgaaaaatagtttctttttcctttctttttttctaacttttattttaagttcaggggtacaagtgcagggtttgttacataggtaaacttgtgtcatggaggtttgttgtacagattatttcatcacccatctcttaagcctagtacccattagttatttttcctgatcctctccctcctgccaccctccacccttccaagaggccccagtgcctgtcgttccccactatgtgtttgtgcattctcttccacccagcaatcccattactggaygtatacccaaagaaatataaatcattctgttataaaracacatgaacaggtagtttattgcagcactattcacaatagcaaagacatggaattagcctaaatgcccatcaataatagactggatcaagaaaatgtggtacctatacaccatagacaactatgcagtcatgaaaaagaacaagataatgtcctttacagggacatggatggagctagaggccactatccttagaaaaatagttctctaatgattgcagtttcctggggatgaaccatactcttaagcttacttgggatggcttgtcctcattgattgctatataagtaccttctataagatctctaaagagatttgtattgttatttatattcaaagattaagcttcttgtgttgaaaaatcatttttatgttatgtatgtcaagaattcaggatcttgaatgtaaaaatcaataaaaataagagggcatgcttttattagaaatataattctcaaaatttcaaaattgttgtattacatagttgcatattgttgtagtcatctcaggctgccgttacaaaataccatagactgggtagcttaggcaatacaaatgcatttctcacaggtctggagattgggaagctcaagatcaaggtgccagcatgatcaatttctggtgagggctttcttcctgtcttgggggttaggggtggggagagagagagaaagagagaaagagagaaagagagagagagagagagagagaaaagagtgtgctcctgcttgctatctggtgcctcttgttataaaggcattaatcccatcgtgatgaccctgctcctcatgacgtcatataagcctaattatctatcaaaggcccatctccawataatctcacattggaagttagggcttcaacatgtgaactttggggcaatgcagacattcagcccataacgaacatcatcagtttagtatcaccaacattaaagtcaagagttatactacttatttatagtttttcactcaaatggagtaacccatgtgcattattaaaattggtgtattttacttatatgaatacatattttgatgtttctgatgatgatgtagtcatgttagggaacttcgtgcttgactagaattccatggtacttttcctaaatatttttgttttatttctgaggttattatttattatttataactattgttatgaaagttatgcagaagatagaagttgaatgctgctgaagtgatcgtagtgtctactcagttacagatttagaaatgcgagccattattatgaagcaagccttataataagatataaggaccaaagagtatagtgaatgtgaaagagttatgagcataagattgctaaagattagtttactatctattagcatttgaagtgtcaaagcattattcagtgtgtgtgtgtgtgtgtgtgtgtgtgtgtgtgtgtrtrtatatatatattttatttttattttttttgagacggattctcactctgttgcccaggctggaatgcaatggcatgatctcggctcactgcaccctgtgcctcccaggttcaagtgattctttttggctaatctgagtctttttgaactgagattgtcctattttaagagtttattttccattataaaagagcagaaaaggccaggcgcggtggctcacgcctgtaatcccagcactttgggaggccgaggcgggcggatcacgaggtcaggagatcgagaccatcctggctaaaacagtgaaaccccgtctctactaaaaatacaaaaaattagccgggcttcgtggcgggcgcctgtagtcccagctacttgggaggctgaggcaggagaatggcgtgaacccgggaggcggagcttgcagtgagccgagatcccgccactgcactccagcctgggcgacagagcgagactccgtctcaaaaaaaaaaaaaaaaaaaaaaaagagcagaaaaaactaactagtctctttatttatgcataaactctaccagttttatttcctagcaaagaaaaggggggacctttgtattattctcacaaaatgtattttgcagaaatatctgaatgttgttgaagtagcaaaatgaactgtagagaggtgaattgttttgatctaattaaattatggtacctaatctaattgtaagataatttttgaactgaagaaattattcagaaaaattccccaaatatccttccattctcacactatacatttcagaatttcacataaatccaaacacttccatttccaggtcaggtcaaaaaatctaaactgtttggtttgtagcagttttcacagacacaggagcccattatccagaaacagctgtcttactaatacttatttctcttaggaggcactccacacaagcagggactcgctggtgttgtgtttgttctgtattaatggttaagggaaggtaaaggggtctttctgatagtttttcctgtggcacagattttgcgctgtggtaatgcttattgtcattttgggaaaaatagtttttttatatataatacttatgtaatcattttgatacagttctataaaattatatataatatgaaatatatatttgagaaaaataattatctatattatctatatctgtttaggccctgtttatctaaagtattgctaagtcttgctacggtataatattttcctttatggtttgaattaaagcaaatgttaaaggaaaacaaaccctgaagcgaacctcccgatagcttcatagctgctgtttacttactgttaattttattgaagtttatgcttcaacagagcaaaacacagtggtctgaaactagtttaatagaaacccaagtttttttagtgagccctctggacagagctttgtctttaaggtaggggtaatctagtgtattggagggtcctggacttgtatcagaggacttgagtttgaatcttgactgttgagtatcattgttgtgaccttgaggaagttgctaaatatttgaattttcaattattttcctcagtgaaagtgagacaagaatgatctcacaggctcaaatgagaaaattaataagttaattttaaaaactccctttttgttggaaatgcatctataaagtcatacttctagatagaattcacagtgaaaaggaatcatcgaatgtagttgggattttcagatattctaggttttacccatttaaagcaccaaacatttttttctagttgaactattttgattgagcatttttctaaacattattttacatgtatctgctttgtaaaatgcacgggtattattgccttacatttgtatattcattcattaagtctttaacaaatatttgttgagtgctmttctgctccaggcactgtgctaagccttgtacataaactgatggaaaaatggacatacagagtgtatgaactagtaggaagacacgcactcaagaggtaaaacaaacacacataaatgatacacacattgtgataactgctaagaagaaaaacaagagggcactatgagaagaaacagaggggaaaaactactgtaggttgagtggtcaggaaagctctctctgagaaagtgaaattgaagctgagatctgaaggatgagagccagccgccttacagaatgtgggggagaggattccaggtactggaaacgaggaaaagaggcctcgtaagaaaaaaaaggccctttttgttttcaagaaactgacagaaattcagtgtgactagaacacaggaaacatggagaagactggtctgacaaaagatacagaatcctgtatagtttataaaacatatttatagcttaaaaccagttgagatgcagaagactttttttgtttccatgtatagacactgagggttaagggggctgacttgcccaaggtcaccctgctgggaggggaggatgaaagctccagcctcctttgacccctagtcctaggctctttgtgctgtgaaaatttcctagctgaacagtttcatacttttctgatgtctgaggccattattatgtaatcagtcactgaaatgaaaccctaatgggctgttgaggtgtgaaaggcccattgccctgtaagatcttctgaattcttatgtctgaatcatagtttttctgtctgctgttgggttgctctcatttgatttcagcwattcccttatctgtttttgaggagctgcagacatagaaaccaacatgtttagtttattaggcacgtgtaaagtaatagccaatggcttctgtgtgagagcccattggattgttgtaatatttgttgtctcagtaggacaggcagtcatgtttgactattcctaattgtaaaattgattttactttgaaaatatttgccaaaaaataaatcatgtttaaatgagggagatatttacataaagttgttgatgtctgaggagccactcttatcccattctcttaagagtttcaaatcaattgtgaataatcacaggagttagacaaagatgacagtaccaggtttattgttaataaagccagactggacagctgtccatgaacctaaggcctaaatcatgcttccccttctttacccaagctgaacttaacaaatgcaatcagacctctgtctccagaaccagaagacagagaaagaacgctatgtacatctggaaggcaggctgcatctgaagaaggtagcccaggaagggttaatgaaacctgccctgtgaccttttcttctgttactcatcagaaaggaaagaagtaatacctgatactcacaagaaagtttttattttataaaatggaataaaaatatgagaaaagagagaaaatggtttcttctacattaaggtaaaagcaaaccattatgatttaattagacaacatttacaagtaaaggtattatgtcttgtgaacatacatacttagtatcaaataggataatttcagtgttacggcttagtaggctaggagtcagagacgacttttacttactttattatttaggagaagccgtagaagaacagtgagctccagtttcgtcatctgtcataacgagtgctataaatacatgctctgtctgagagaaacagatgctactgtgactatgaaagggtggtaggaaaagagaatgacatctgagtacctactgtatgccaaccaatgtgttagatgcttttcaggatatcttgtgttatcaccataatcaaacaagtgttattttcatttttcaaagaaattgagtgtcagattctacaacaaccattttttgagcatttatgataagccagtctctgtgaatacagtggtgaacagggataccacaagaaagtggcatttcaacacaggtatggagagtgaggggagctgggcacatagagggagggttgcctggtcgtgttcctctctaaccagctttcctctacaccttcctcagatggtcttcctggtgtctatttagtcagaaaccgggatggcattctcgatgctcctctttctcttatcccatacacccataggtacaaaggtcctgaaatagcatagagattgggatgtttatggaatagagagaacatcatttcttgtatgctttgagagttagaattgtgtcttaagtgcatagggaagacacagaagcgctttagactggaatattgtgaacctactcttggaagaaggcagttctccatgggtctctcacatttctgtatgtgttatgagtaatacctgatactccagagttcatccagactagattgggtcactggcctacttatcacaatgggtggatctgaagctgactgttagattgtcaaaaacatctccatgtccattgtcgttgtcacagactcccttttcaaggatgtttgtgaacaactttagaagaaagtcatagtacctccctccatagcaaaagcaggcatgcttactgtccagaatgataataaagataatgtctttctttggaaccaagggcaggcttgtttactgcccattataaaaaatatttgatgtccctacattcagggtygtttgctgcaatacaatcaattgcatgtacaggtgtcatgtcaccttgagggaactggggatcagagaactgtcacaagaaaatgctgatacctgggcttcctttattgkaagtaataagtctcattattgtragtaataagtctctgaccgagaagtcttgtgtatcctgccagcatctgtgaaattgtggcaggctaacttattagcttgtgaataagataaaactcaaaccgttcgtagttgttggcagttttagggatgaggatggggtcctgatagagacataagtttctggaagagaaagaatgaagacctcctgggccaattgatgagatttgagaggaatccatggacatcattagtgaacatgttgatcaacttgtttggtcagttagggaataaatgaccctccattttattatctgttgatgaggaagaattggagagatgattgtaatccaagtacctggaaataggtttaaagtcagctgtttgaaaggtgccctgcatgttactagccctgttccaggcatggagatgtttttgacaatctaacagtcagcttcagatccacccattgtgacaagtaggccagtgacccaatctagtctggaggaaggttctgaccctctttgtaacaacagttataatttcatgctctggcatacaaggaaggaaatttgtaaccactataggtagaaaccaagcaaatagctataaccttgggtggttcccttagaagatgaaggtgtggggtatgtaatacttgttcagaaagtattaaccctcaaggttcttttagttgcaccattttacagcttatcccctcctgtagactatcacaccaaccttagattcactaggagacttagaatttcttagagtggggccaggctgctataagggagctttggttaccttgggggagatttccttgaaagagaaaagctcccataggaagccatggatgaggtattgactagtctttgggccgttattgtyctagaatgggtttgtaatgctgatgaagattacctattggaaaatgagaaactgacctaatgaaatctagacaaattcttaccgtcacccctgttgcctcgcaaaactctcataattcttttggtgaagcagtgatagaacatgagatgttataataatggggcagtaaatgccctcaattgaaacagactccttaaaaaawatagctgctgcgcaggtcaagcccaaatcagacaaatggaacaaattctatagccacagccagaaagtggttatggctgctaagtctaggggttcccagaactggaatagatggtgtctgtaatgatcttgctgccaaatatagagcattgcatggaatgaaaatagtagaagtttatttgattgagccctgagccagctgccaatcaaaactgaaagtaaataaatcttgtttactaacatagaactgttctctccctctctgcycctgattccccctcctcggactctacttcagctttagcttctttaaggaggaaagaatggagctgggttctctctgtcctgaaagaggtccacagttcttacatgcctctctccaagtatgctgggaaactctggcgagggcagggacttaaacttttatggctctgtgagatacacattaaggaaatattaactggcccaatttatcatcctgcccagtccgatgaaggaggggatagctgaattcagccaaggtggtttgaacatggtttgcagtgggggaaggaagctagcagaccttacgggtggggcctttgttccaattagtgtgtctttgttgtagcttcccctgctgaattgtagatgactgtactatggatgtttatgaagtccagaggggagtctcctgaccaggaagagttgcaagtacagaagtgcttcttcctttggggccccacaaccctaatgacctctttggagcttcagttctctatgactgatggtattgctgattggagcctcttgcaaaaggaagcagcattcacccttggagttctggactcacagctctgacgttgaaacaggtatattcctttaaagaagggtctcttctagttaaactgaatgcctggcccgtggagaccttgtaactctttttttttttttttgacggaatcttgctctgtcacccagtctggagtgcagtggcgcgatctaggctcactgcaggctccgcctcccgggttcacgccattctcctgcctcagcctccccagcagctgggactacaggcgcacgctgccacgcctggctattttttttgtatttttagtagagacagggtttcactgtgttagccaggatggtctggatcttctgacctcatgatccgcccgccttggcctcccaaagtgctgggattacaggcgtgacccaccgcgcccggcgagaccttgtaactcttgagcctgatgttcccgctttcgggtccagtcatactcattgaataacaagggaagggcccaacaggcctgggttgtcaaatggaaatggcaaatttaggaatgcagccagcctgaggcaagcagcatcttaacctcacttgagaaagtggcagctctaatctcccactctgctgcctgattcaccaaggttcccctaagtacctgggcctgcctcacttatggatcagctaacctgaaacctaatggtatccagtgggttatgttcagcctcaccatcacctgctcaactagaaatggacattgtttctgtgctcagtgttcacaatcaaggaagtgctcttagccctggccaatactccccttaatgaatcttgctgtgtttttactgtctctgggagtgttgcaagtgttgccaatgacctaggtgtttgggctgccacttgaaaaaatgccaactggaagattataaactcccctctttggggccacaagctgtggaaatggttgggctgtcacagttatttatatagatggtaagggcctattctctgatgaaaagcaatgggaatcaagctgctggttccacttgcaccacccagattgccaccactgctgcctcgcttcatcagggtgttggacatgcgacacacccacagcacagactgggcacaaggtgaaggacttctgatatcgaggtgactggcatcacagacttggggctcctgccaatagttgacctgtttgtctcaatgaaggaagacacattgtatgtacagggagttacttctgctaattcttaacagatttactgcatttgactcctcttgaaactggcggtggtgcctcactgctgttgacacattttcaggttatgagtttgccaggtgcattccagttagtcaaagccagtggtgcaccttttattgtagaagccagggctgatagtcaaagtatttgatagtctttccatgctccctacagtacataggcactttgtattgttgaatgttggaatggcttcctaaaatcaactcaaaaagatttaaaactctacctgcctaatctcctcctggtttggacacgttaataagacagttgggtcattaactgcaactggcccagttagggatcatcctctttttgtcctttcttggttatgatcaggatgaaaataggttatctagaactattttgaaaattcaggatatcatcstgaccatttctagacatgatgaatctttctttctcctaatacctatctcaggctagactgtttggtacatctgctgggtggcagcctggtcaaaagatggaacaggaattcaaatttattctggttcagcctcttgagttttcttattggattgcattatcttaggatattgatcgcttggttgggtaaactgctcaccaagcgcccccaaaccttgtatccttgagtcttcttcctgtattcacgaaacggaggctagctaccatgttagcttgcacatagggtaaaatctcagacctttcataattcttgacatctacttatgtattgaaatagytttagccacttcctgccgaatggattgaagagttaatggtacaaattgggagtttatcagttgtaccaggggattttaatttatggaggtgactgagtgacaacatggagaggccaatgccatcgaaagattatttttattacttacatttcccaagaggagggggggcacttacattaaatgtaagtaattttattacttacatttcccacgatggggcgcatggggaagcactgggtttggtcaggatgcagaaggaggaagggaaagcctgggccatatcctttagtggggtttctgtgggaaagggaagggcagaggaaacagtttaggactggctagtttgagtaatttcagtgggctgtgggttgtaggggtgatacctggttgtctggtacctggccctgggagatttagggaaggggagtattgacttactgatgagaagttgataaaggggatagttgagggtgtggtctctggattggttagctgcatatgaagggcatgatcccagaccagccctttgcactaagaattggctagctctgggagtatagtctcttcccattcagtgaggccacaaattccagagcatcggaatacagaaaataatgaaatagagttgatataactggccttgtgataaatggatgccaaatagacaaacacaatataagaaaacagttttagaggagagaaactgcttaggggattactgtagtaatccaaataggagatgacattggttttaactagagaagtggctgaagagatgaagagaagtgaacagatttgagacatattttgaagcctgcatcaattcaattgatgatgaatttagatatagagtttgtggaaagggaggactcagtgactcctgtttccggctttacctaaatgaaacattttggacggtaaatrtagcattggtagagaaataataaagagttcagcactggacatgttcaagttccatatggctgtgagattatttatgtagaggtataagttaggcaggagagtgagagagtttagaactaagaggatgaatctcaggtggtgataaaaatttgggaacctacactatatagacagtagttaaggcatggcactagatgaattatccagtagagtttgaatgactgggggcagatcatgcatttgcccacagccccacctccatttgacctgcttctctcttttaaataaccatcttggcttctgaatgtatgtgagtttgtcagccttaataggcaaagaaggaagacagttaagcaaatggcwaatgaaatgattgcattgatttctacgtggtatttgttatacagtggcatggacatgatttgttaagtgtttaactaaaagtagtcccttaggttttggattttatattctaatgtagataacacatcagtagcctggctaaggaagctgtggtggctgtttagttttgatttcatgtggtctttttcaaagtagcaatttaggggcttattgaacatacagaaattgtacattgtttttcttcgttctctaatgcttgccagtagttatcagaattacatgactatgcttttgtttttttctttgttctcccatgttggctctgttttatctcttaatgtcaaatgtcatttcttggaatcattcaggaagttcttttagttagtttgccagtaatgaaaagtggcaagaaatgctgtaaaagaacctggaggtatttcacagctttggagatgaagggtgcttgatagattactagacaagtagtcttactaaactgctcaccaagtgcccccatamcctggatccttgggtcttcttcctatatccgtgcaactgaggctactgtgttagcttacaagcagggtaaaatctcagactttttgtgattcttgctgcctacttatgtgtactcatgctgagaagagtagaagacacgaagaaaggaagtatgtaagcagcttccttgtgctaagagttatggagagggagtagacaaagtaaatgtaaaggatgcaccccatgaaactgcagtaattaatttattttcttgattttaaaaatacgtatatatgtggcaagacttctaccaaacttaacaggtgtcattactgactaaatcttgattcgcatattactttgaaggatattcatgcatccaacaaataccagtgtagtactgacaatgggaaagtcactgctatttaatatatcagctgtcaatagttcataatagcttcacttttatcagaatgtgtggctgactctcatagattgatggactcaaaagcactgtatagaggttttggaggtcagggtgccattttcaacattttaaaacaagggaaattaagaatttacccatagtaaggctgtactggtttttaagaatatccagttcctttgattttggctatcttattaactattaataattcgtacctacaggatgtcataataattagcarcattgaatgattgctatgtgcttggttttaaacatggggtaatgaaaaccgttattgttaaataaaatatatrtggaagatggagtctttcagaatgtgtggttcatattcaaaaataaatactggcactctgagatggaaacctctatgtttgttcccaggtcacataattaattggtggcagtatgctggaaccagaagggcatcctagacatctctgtttataaaatgttattaaaaatcatctatgcaattttcccacttggttataatggtacaaagtaaagggataccatttctstgtttctaggaacactttggtgtcctggtgtaagctgagataaagattatatttctcatcagaaaaattatagttatttgtactctttaaaaattgaaactgcaaatgacatttgttttcacgtttatatttataaagtcttcaccacactttgtttgttgttcctacctcgccccgctttaagattagggaagaaaattacaatccacccaggcttctttaatgcaygaagaacttattctcccagagttttaggcaaggttcactgggcctctattgtaacaggaacagacatatattttgcttcagtgagtgtttcttgagctcataagcattttgaaaatattgaatgacttacagtcccttaagaaagtagccatttaaaaaagcatattcagttgaactttaaaaatataatttataccacaatactcaacaggctccaactgcttgaaagtatttggctgcaaagacattatttttagtgatcctaaccatactaggaacaaagaattgcgtctgtcaaaatgggatctctggcgctctraaataatccacatgctttgtgaactttgatgaagtcaggcagctctctgtcatataaatatcatagtggcatcaaaacctgggctgaccatgtgctgcaggtggaatgcacacactcacccagtttcgcagcagaagcagctgacactagtagggagacagcgccgtcttcagttcctaaagccattggggcgtctgtgtgctgtccaaacctgaaataggtaaatgattcttcattcaatcctcccttgaaaatgaaaatgacttcagtaaatacttgtgctacaaattactcagatgcagtatttactcttttcctgtacgtcactgtatcatttagagccaaactgtaaagattatgagaaaaaaagaaataaactcagtgttagataaacaaattagagacaggaaatgctacactgaaatactgtctgaagaacttatgaaatgagtttaatctttcttttaagatctgttaagacatttttgaagggatgagagatgagttggaagatactgttttctttaaagaaaataattatttttcataagctattagaataaaagggaatgttaatatcagataatagcattattatctgattttattatctaatcattaagattactcacattatccttatctcttgaatttatctattcttgtttcattttcatttcattagaaattaatatatccctctctttcgtaaacataaaagactttattttataaaatatattacataaaatgttaacatctgtgtgagcatttataattgtgttcatcccttcagtctacctcagatgaaaatatatacaaaataaattaaataaaaatgtctgtaattatctttccattttgttgacatacatgtgtacctaaaactagaagagagccctgtactttttagagtgaagtaataatgaaagtgaaatcttacataccttgtcttatccaaaaaaacgagaacaaacaaaaatgtaaaatgttggtagggaactttaaatgaataccatccttattgatattaacttgccataaagtgtttctcctacagaaatgttttgctttaaagaaatttaaagtaaaatttgctttttgaaaatttaatgcagggatttaattctgagtggtttacaacaatgggttatgaatgtatcaccatgacagcaggttgctagagtctaggagtcaggagatgtggcttcattaaaagcacctccagataatgccctacgttagatttcactgaaagacaggagctgctgatgagggtgacctctgacatcaagtcatcttactataaacagaagggcgtggaaagccattggtcggaaccaggagtgtttactatccaggtctcctcctatttaacctacataactgcactgctcctggagcccgaaggttcacgccagagcaaggtgcttttaaggctacctgggtgttggttagagactataaacctctcagagcattctgtaaacctcgacacagtttcattctactgacaatggagactggaatttattggctgctgaacttcacacacacgcactacagaactgacttccaaatacagctggaataaatttcaggttttggggttttgaatgaggtaagttgcatttagcttttggttgaagcgttatcattattattatgttccatgggcagtcacacatttaagtgtaggcagttctatctcagagaaaaatatttttcttgttaaaataggttgtttagatttttcacagttttttagtacaaggatgatagaagaaacttgtacataggaactgagcaagccaatcaattagagaaaatccctgatctgtttatggctaaagtgtgaaacacacttcgtctttgtttactttataaaattcagctattcaaattacattatgttaatgttgggagaaatgcaggtaacgtgataagtgataatagattacatttcactacaaaacttttaacagtcaactttgttttcccctaatagtacatgctactgcaggattttaaaaaactaataccaactatttaaatgaaaggcttttttctgcataatttgttttgaaatttgtgctgaatttgaacttttcattagatttgagatgtagtcatcttgatagatatgtcatatttttaagagaatgagtgtttccctccatttatggaactattttttcctgaaaccataatagtaagatcaagtttaattttaactttttaaagaatcctgtagtgtttagtgaggtttaccttcctttagatgtgtactgagcacatactttgatttaaaacyttgatgtggaaggctttggtatgctttggtttaaattatttaaatatatctttgtgtctttctcaagaagaagaagtgtaaattgctgttttgctgcatcagagggttgagatgtgggagaattgtcaaaataataacagcatttgttttgttaaagacgactgagggaagctttgctgtgttgggactattttattcttgtgagaacaacacaattcaggcggagaaaatagatctattctaagtatttgcgagtactgatttactgttagaggtggatagttagggaagctgctggaagaaagggaggatagattatcccagccaataagttttcccgtttggtttacggggtctactgagcatcagtcagcactatccagtttcccacttcttttctgagttgtaggtactattttctgaaatactctgcaattgaataatgatgttacactaccttattttgcgttttgtttgttttctaaccgaaagttcactaaaccactaaaatgttacttatcaaaaatgaccaagaaaagcaaataccagtaaccatataatgggttctaactttttgcagggggaagaagagggacagagaggccaattttttatctctactttggtttttctcttttcttctccaagttccttataaattactctcgttagcagtttcaaaattgtatgatctaactttttgatcctgtagcaaccctgtagagggagatggttgtgtgagtccaggggtggcacacattttgctttagggaaatggtgcaagccaaatttaacaggtaatgcagctgttgaagaaatagaaaagccagatgacttcctacgtgtattgaggaaaccaggataaattgtccttagaaccagctcccagaaagccattttaattgaggtcaaagaggaagaaattgtgagtatatctcaattatttattaggtttacctagaatgagaccttcactacagatatacctaatctataattcctatactctttaacccttgagcattcctgctgtatgaatccctttaacatttagactgcagagtgtatttaattgtttatgacagtccagaatttagggacataaaaattgtgaaattaactgactaaattttactttcatctaaggaataagcttctgcatataaaaattattgtaataaatttcttagattttagttgaagttacacagttaatgatgctgtttcttctggtcacatgcttgtatgtgtgaaatgtttcacatagaactattttcagctcttagtttacaggtaatttaaattgttttttctttaatttgacaatttgagtatttctactcaaacaaatcatataatttgcattcttggtgtgtaaattatgctacagtcagtgtcttattaactactaatgaagaattttattttaggattaaaacctgagaaaaggtgatttgtaatctttttttataacaatggttatagaagagagatttaatataaaactactttaaaatagattttaaaactcaaaaatgttgctacgatgttgtggaaaatatcagattcaatccagcatgctataaatacatttttttttattgtataaagcttaattttaaaaataaagaacttgatgccaacattcttgaattttctctttataaatgttgctattttaatggaagatcaagaagataaaatctgtaaaattcaaaaatatgcctgttttacataattattttatcaatgtattgttctagaaatatttatattttatataaattaatctacagatatatagagatatatgttgttaaatttaaaattgctttaaaattttgtgtgcattctatcaatttgtttttaaagttaaagaatttctaattttttwaaaagttatggtgatactattgggcacattaggagagtttttatatatacttttaaaatgttttttaaagtttaggcatatatatgtacttatacagacatacgcacacagataaactttaacaaaacttttgcatatgaattgaacaattttatattggtaagtgagacaacctttatagtcaattattgttcaaattgaaaaggttagttgtcatttttacttaataggtaaatgatggtgtactagagtatattacataatgattgatattttatgtttggaaacatatgtaactatgcctgtggccaaattcttttgamgtttaatgaccaagatgagctgcatttgttaagtggtagagcactggcttgtctggggtccttttgtgcttggcagatcttgataaatgggtgagtttttcttaaccttgtggccaaaacattccaatatctttaaaaaaatttataaagatatagaatatgttgcgaaaaacatgagcaaattttctctatttaggggactaggttaaatttttaagatgatttttaaagcaatatttgtgagaattcataaatattcattttaatgcagggaaatctaaagtttctgatatgtaatactgctggaattcttctttcctggttcactgcgaagctgcacagtagtcagcaattttaatttcgctgcagaagattctaccaaattaacattatgatcattaagtgataattctttagaatattcattttgctctttttgctatgctaatacattgtaaagcatttatccatctttcttgtgacacccaggacggcaaagaaacatataaacaaaaggtataaagaagaccaagatatatgaggaagtatctctttaggtgtttgtttatcatgcacatttgtgaggaaaaaaattcttttagcgcttatgtatagtatttatgcatagtatcaaggctggacaatctagtcttttttccaatcttagaatgggagctttcatatgagctgtaacatgatatgttaaagcatattatggttccttttgtggcattttttaaaaagtaatgtgttacctttgcctgccccactgggtaataatgaaaaaatataccattagaaggagtttgaaattttcctaaataattcataaagccgatatggcatttatggcaggtgaaaaaggactgtggcatagataaggagaaaacgtgctttggcattttaaaggttaatgtgatttgacatttggtttaatacttacatactgtacataaataattgtgctttgtttttctgttattgttgctaagttgctttttgaatatattcaaccttgctatgaactctcaaatcacttgaaagctattgtgacagttgtagttgatgaagagttatagactatagaagtttttccacttaaaacataattcctccctagtgcatgattttgtctaacctccctcccccaaaccagggtcctggaaggccctcgcattaaaggccagaaatcaagtgagatcttgcctgtgacagcccaatactaaaggagtaaaataattttgccttcaggtttttggyrgtggattttatttattaattatctaactccactattcttaataggtatgttattttgtctactgttgcacttagagtatytgatagtatctttgatgtgtagcagttaaagaagggttatggcaggttttctttgaatggaagtagatgcagacttccaggtatgcagtagagtcctctcactttcatagtcaataaatggtgatttgggcttttagaaacacggttttggttttgccagggagaagcttggwtaaggaatgataaagaggttgaaaagtgatatagtaagaaaatggaggaataaatagacttccctaactacatgaaaagaatttcagaaatgtatacattttacagctgcaagatctttgtttctaaggaaaacaaagacactttattaaaagttttgtattatttaataattggatttttagaaactgtatttctaagactttaattttttgaccaccatttggcaaaatgccattttattttccttgaaaagcctctcaaatttgtataaacatattaaaacagagatatattttttaaaactcttggtgacaacttttgtgttgcaaagatttaatgtttcgagtttttaaaagttaagaagtgaagtataacgtaagtgaaagatagaaaatgagtcgtattgagaagtgttgacacatttttagccagttgagaaagtgcatctccaagtttatatccctatgggcctagcagtacaccaatcctatgaagatcttcacaacataaatcatatttacttggatccaaaaataatcataggttatcacagtaaagtgtacatcttatgggaagtccttgagtggtattaacttttaaatattatatttaggatatgagtatatattttctttcacacctgtacgtaagtaaactttggaataatttttagtaaaagcttatattgtaaaaattgtttatgttttgcctatttcatttattacattaggactcaatttttaagttaatacctacttttacatttttttatgttccttcatacattcctgaggtatgtaataggaaaggacatatgtaataggaaaggatatattttaattcatatgtattaaatgctgctaactagaaaccaggataatctagggcagcccattaaaccctgtatcagtcggttatcaatttttaaaaaaattaatgtgataagggccagtcaattgagatgcattaaataagaacatgacagctattcctggaataaagctggaataattatttaaaatacttttaaattacattatttaatttaaaattcaaatatggataacttgtaagtattagaaaatatgaaaaatgtcacatagccatggacatttcaagaagtcttttattytcgctaaattagaagccaaaggtaactaaagttagataccattctgcttaatcaggcaataatttacaacaattttattcaacccagtcataaaattcatttcataaagtatgcattcatataagactctaggcattgatatactacagttttttgaaataaatatcacttattcagtcagattcacatcttagagtattcacattagaaatgccaacaaagccgacaagtctaaattgttgttcacagtaattctgtatcgttttctatgtttacaaagagtttggcatgcaataatctgtaatataatctccatttttkgaaaaaaatatttttctatctgcytatccatgttttccttaagcaatagtgcatttaatctcatttacattatattttatattttctacacagttcagtgaagaagtagtcttaccatccataagaatatatattaataaattatttattacataaactttcatttgtgaaattttaatctcgaatttatagttgctgaatccaccttttgttttcagtgtatagtatgtcctaagactcaattattaatgctcatttcaaaacaaaatgaagttccaaaagagatcttttgaaaatgtcttcttacattattctattctttacattttttattcccattaatgtttcacgatttgtaatcagaactattcactagaagataattgggataattgagcccagctattttggaagatgctagatataataaaagaaccttgctcttatttgcaaactttttttatgagttaattctcctcaaaagattgtgagcttctcaaagcacctagtggtttggaaacattaaaaaaattaagattgatttttatatatgaatgtaatagtcataattccaaagagtccagaaattatggtattttctacatatattttccagatattgaaagtattaattattctcaataccaaatcacacattctttattttaaagtatactttatgttacttacgtaaatacaacctaaaaagcttgaggggtgaatagtattgtgaaataagagatgcatagtgttgtgtaataagagaaatgacatttaaaaataattgtgtgactaatgtaataatattgaccagtcctctctactcctttattctgctttattttcatctcagcacttaaccactgctggcattgtattgttcatttaccagtttacttatttcttgtatrtctcctccactagaggaggaggtgtttgttgggcagacaggtgtttgttggtctaggtgagtgctgttcagtagaaaaatgatacaaatcctatgcgtattttaaattttctagtagtcacacttgaaaagtaagaatcaacaggagaaattattttatttaacacagtatacccaaaatatcattttactctcaatatcaaaaatactaagatattctacttcctctttttcatagtaagactttgaaatctggtgtgctttttacactaacagcacatctccgttcaattcagccacatttcaagctctaaatagccacgtgtggttagtggctcctgtgtcaaactgcttacgtctagttcatctctgtggctggaacactgcctcggatatctcaggcattcagtaaagccttgctgaatgagcaaatcttgatattttggacagaaaaagaaacaacgcagaagttgtttttcacattagtttttttttttttttttttggctgtttttggggtggtggcggaggtggatgctagagatatctggataattttgcttacatggagtttaaatgttactagtgcttggtaaaaactggttacttcagtagtctagtttaaaggattcctttaatgactgatgtattataaaagtaactagtaggttcttctttgaaaattgttccacagaactttaatttccactcttagttttaaatgggagatattagtcaagggtacaaagttttacttatgcaaggtgggtcgttcccagaaatccactgtacagaacagtgcctatagcaacaatataggcactaatattgtatactttaaaattcactaagagagtagatttatattatgttcacacacacacacacamaatttgggaggaaatttttggaagtgatggatatgttcacagcatagawtacagtggtagtttcacaggtgcattcttatctcaaactcaycaagttgtatacattaaataggtgtacctttttgtatatcaatcatacctcaataaagtgagattttaaaaagaaaggaaagtaaactaatgaacacaactggcaaatgtagcataggagagaatgaaaggcttgatgtgtggccttaagttgtaattccagccttgctagtgttagctgtgggatattaggcaagttgttgaacctctttgcacattagttttctagttcataagaggaggattttattaatcatacctgtctacatgcattaaatgagattatatatatacatagtctagcagagtgagtggaaaagaatatttgcttaataaatggcagtaattattattgttatgtaattgaagtcaaattttaaatattaagacgttttgatcttcattttgaacatttttaattcatatgtttatgaattttaggttcttcataggttctggttaaaatgccttcatagatctggagttgaaatttgctacataacttgctttcaggttgtttctgcttctcagtgttactatatgggaactgggaagaaaattgtatatatctaagcactgtgcctggcatgtggaaaacactcaaaaattttagctgttattcayccattccttcatctcaaaaatttagaattttgatatttatgttttcattgaatactaatagttgcttttcttaaaatagttaaatatttaactctttttcatggtgcttggaattttcctgtatttttataatttctctgaagagatattgcataggttaaagttcactttatttgcagcaagttgcattcatttacgctattcatcctttctgtcttggtgtgtgtgtgtgtgtgtgtgtgtgtgtgtgtgtgtgtatttctatggaaaaattttcaacatttatttttttatttattggcccacccccttgtgtgtcttgtgaaaactaggatttgaatttaactttttggcatgaaattctgactcatttcttgacctgcttgttttccacttcattcaaaacacattcagaagtaagcctggggtgatggtgcatacctgtagacccagttacgtggaaggctgagacaggaggatggcttacactagggagtttgagactgtagtgcaccatgattgcacctatgaatagccactgcactcctgcctaaatgatagtcattgaaggttctatatgttttataagaatattctttcttatatagcatatatgggtcagcacttgccatttaatgaagtctcaaatggaagagtgtgttcaaattaggtaaaactatccatttgcctctacttctttgatcaaaaccctagaaatatttttcttgatgattcctttaactcctctaccttaattcagaaataagatagggttttgaagtaatttgaagatgtcataaaataaccttttttgtcttcggtatatctaatctttcttttcaaatacagataaaaagatctgataatattctagttaacacttcaatcaattacaatattctgtcaattctatctcagaagtgtttgtcaaaaacaccctctcagttcaccccatggctcctgtcttgagtcttcaccacctctcactgacagattgaatggttcaaagtagcatttggggaacacctactcagggctggggatrtaatgatgtaccagatcaatgccatctctgccttcatggaacttctactatccgttttgttgcattaggcttttcccaactttcagccctcacctcatcccccttccacattaccttctatagcatctctacccagtttgtttttttacaacctttcaatggtcttcactgaccaaaggttaaattccaaattctttaccgtatataagggcttcataatatgcttcctctggcaaacttcttgacactgaaatacctactatttcccayatacagtctctgaagactcaattcagaacttactttcttcattgccttctccatcttcctttggctaagttaatttgttctatgaacactcacaatactttagatagacttcccctagagtagtcatggtatcctaaatattattcttctctcatttgacmaagaacaaakgaatgaaacctctaaaaataaccactctgctaaatggttattttaatatctaaaggaatttctaattcattctttcatcacatgcctgttaagcattggttataagtgtgggactctgtgggtactaaatagcaaaaccctgtagatgtgttctctgcctttactgttactactttgagaataaattaaaacaagcagaactttctagtaagttctttggggtaattatgctttggaaagccgtgggtgttaaagactaaaaaaagttaaatgataggaagcttgtctgtctctgactttcagttgcgagcatatgtctagtttgtggtggtctggagcttcctcagccagtcccaaggtccagtcatcatggtcttgaggaaagtgacattcacctggggataatttctgtgtattcattgggcagttcatatagttttttggtgataaatcataggcaagaaccagtaggaaagaaggttctttttttttcagatatgctttccttttaattcttgttttcctcatacaaatttaatggacataagacttgtgggatttggagttaattttatgtttacatttttaaaaaagtatttctccctccccaccctttccccttttctcctcctackccttattcctcttcctcctcctccttgttcctcttcctcctcctcctcctcttcttcttcttccctcccctcccctcccgttacttccttccttcctttttcctcctcctttcttcctcttctccctctcctcctcctcctcttctttctctttttccttttcttcctcttcttttcctcatcccctcctccttctctacctcctcctcctttttcttctcttctctctgtgaaaccgttttttttttctttttttttttttttttgcccctccatctcatggtactgattaccatgttaaaggcatagaagacattacataataaaacaggatgacagtctctttgctggtcagttttattttcatattgtgtaagtgtatacacaagatgcaaaagagactacagagttaatcaagaaaataattgatttcccagattataaaaatgtctagactttktattaaaagcaaaagacgggatttttgaaaatgtagggtttttgtgagtttgtttgttaaggatttttctgaaacagaggaggaaaaaattactttgtgagttggaaagacaatgctgtatcttcaaagcttaagacttacttttaagtggtactgttcatattgcaattcacattgcacacatgttcctcatggtatatattcagtagaatttttttttgcttccaaaccacatattggaagtaaaactccttggattccataggttgcatagttaagttattgaaatatgaacacccagaaatagtgggcttataaatgtatattgtacatttttcatattaaccaagagatttttgaagtttagtctactctgcatatacttttaagaccataataatcagatatagatatawgtgcttgaagtgcarttgtgaaaakctatggatttcaccatctttagaggatgtaccacatacttttgtccagaaatagatagcatggcctagaagtatgagttattctcatcctttacctctgtgggttaaaaaccacaaagttgaaatatagtctgcaagatatactgaaaatatatgtgtgaagcagtgctaaacttaattgatatgttgagacatatataaaacatacagccactagactgagaaaatgaaaattagtgtatgaacattttagttaatgctgtgctttgcatcaaaacctggtgtttattattatgtgcttttagtaggagacagaagcagtatcagttggaaaaacatttcttagtggattgagaacagtatgctttctagttcctaagtgggaaacctggttctttggtttctttgttcctggttaggcttatccccagttatttcagctgaacattttacatactartggagtccagggaagtgtatttggcagctgttcatgggataataatgaaatacactatttagtactgtatgctgctgctgtaaagtgtggggggtattttatagagaacttggtgaacagagctatatccgctttaatagtgtgtgaacctgagtgaggaagttgtattttcatatgagaataactagtactcttttcttacaggtaaagaaaacgtgcacagaatcagatgtttcacaatctcagaattccaggtacagtaaaataaagaccaagactcccctaaggagaattgcagtttcggagcactagtaagatgttatacctgagacacaattgtgatttgaaacattgagcttcttgaagaacttaycttgatggaaactgtatatcatgctggctagcgtaccactactcataatattagtcaaagggactgtgattgaagtcagttttaaggaacaatagtggaagtatctctagaaatacgtgaaaaaaaatcccttggcattaagttaatgttcatttttttgttctaatttctttttataatgttttgaatctaaaattgtgccagatactgaataactgtcaaatctgtgtttacaaaaaaaaaaaaaaaactatgatatttctttttctttgcagtgaaacattgctagattttgagaatgttgtcaaattaggaaactcatagttaatttggcattctcgtttgggttgtttggagcctgtggaaatgatgaattaaagtggtgaggccacttcatataggaatttagcaccatttagttgtttgtggttgaaccagatgcccaacagatttttttagacctacacattttcattgctttcatttcaaagtccaggctgcaattttgaatggataagtaaaagtatcgtaaatactatgacaataataaacacatgttcttactatgctatgagtgatatgacttaacctatgtgtattcagttgagagatgggtctcgktttattttgtcctacttgctcccgcatatagtgcatgtagtgattttcttggtacatgaaaacattgcatatctaggtaaaatgttaatggccaaggccaaggtgggtggatcacctgaggtcaggagttcaagaccagcctggmcaatatggtgaaaccccatctctacaaaaatacaaaaattagccaggcatgatggatggtgggtgcctgtaatcccagttactcgggagggtgaggtggaagaatcacttgaacctgggaggcggaggttgcagtgagccgagattgtgccattgcactccagcctgggcgacagagcragactccatctcaaaaaaaaaaaaaaaaaaaaaaaaaaaaaatgtaatggccattatgtttttctttttgtagagtaagtgtatcttatgtatagtccacttatagtttgagtaactcttgttttgttgtatgcagtatgatattcctataattgattcctgtgcatattatattaaaatgattrcatatggattttccctttggatcatgaagagcatatgatatgatatcagatttttgatctttgatctttgttctgtgtaattagctatcaaaatggaactaactaattttagattattggagcattaggaaatggatgaaccactaaatgttttcctacaaagcagagtagttctaggatgtgcgaacagaagggaagactggggctctattccttggaggmacctccttcctaagtatttgcagacctatataagtgacctacctataacttgctttttaaggatgatatatgtaattagataatttttgcaagcagctggtcttgggagttaggaaaaacagaacaatataatcatccttattattaatatttcatatcaaaattttttagctttgaggctactcaggatttttgggcagataatactatgcttaagtaaattttaaactaacagaaagcgatcaaactgattcattgttcatagttggtatcagtaagttggagaagaaatagaaagagttcagagctcagtgtatttaaacctggaattaggtcattcttttttatctagaaaatcccagcccatgtggccttaaaaatataattttatttttaagaaaaaaatagtttttttgaagactgcttaaaatatatttgtcatttaataataactgtctctctaaatggaaaagtagccagagttcctggaaatcagcagttagttgctgtggattagctgctgcttaaagtttcctaatctrtaatgtaaatgggtaaaatcaggcaaatcaatttctaagaacttcataactttgtgatatcaaaaacaagcaaacaaatacaataatttttcttaaaatgtgagatggaaagaccttcaagaagacctagagtcatttgttggttcaagtttgcccasacgttttgataatgacaggtctcctctcctgacctgtggtacaatggtcaatctccacactctggtcaatatctatcaataacataaaaatgtgactgttcttggatcctgtatttattccccaatattaggcctgagagtgccagaactggcacttaatgtattgatggaacaccaaggagagaataaaaatataccgaagagcactcgacacaaaaaggatacaagaatttactgaatagtgaacaaattatatgcatgtactgaggttcagtttttctaacctgtcaaaaaacaaaaaaaatgacaaccaaacaagaaaaatgtctctaatatagacactaagcagcattattttaatacatacatatatgggtacattcttttttgctcattaagaaccacaggggctgacgcagtggctcacgcctgtaatcccagcactttgggaggccgaggcgggcagatgatgaggtcaggagatcgagaccatcctggctaacacagtgaaaccccgtctctactaaaaaaacaaaaaattagccaggcgtggtggcaggcgcctgtagtcccagctacttgggaggctgaggcaggagaatggcgtgaacctggaaggcggagcttgcagtgagccgagattgtgccactgcactccagcctgggtgacaaagcaagactctgtctcaaaaaaaaaaaaaaaaacccacaaaatatatatattttatacatatatatatwttttttctctctcctctgtgtgtgtatgtatgctctctststgtgtgtgtgtgtgtgtgtgtgtgtgtgtgtgtgtgtgtgtgwgagagagagagagagagattcagattgagatttaaagcccggggctaggtagttttattctaaacaaatatcaaataaagaattgaactcaaagtgaaatactgtatccgcataaaatgtgagccagagaactactgcctaaaaaatgctgcctcacttggaacctaaagctaatatcattcatttatttagttagctttatagtatgttggttttggatttgaaatgattagaataaatgcagatggaaagtgtttttacagtagggaaataattaaattgggtgtggagactttgrcaagagaattcttgaagtgacatatgtgtatcagcaaattctttttcttgcttggccttaattcttttgggaagaaatgcttgggctgcagatgtaatggtatattgggaaaaagaatttacaaacccatgcagtataagtacggcaccaaactatcttctttgaaatagcattacatgtatatagtataagccagatgtcaggaatagtattttttccctgtttcctaaagctactaaacttgatgtcatgtggaaagggatgtgatgtgctttgtgtaaaatttgacattccttaaatgtttttctttttttgctttcctctgtgttgctaaccatgtccaggatgtactattgttcctaaactaatgttaaccataaaatgaatttatgagaaaaacaaaattaatatccttaccctaaaattaagtttgttactagatagaccatcttaaaacataaactgaaatgatattttgcattgatgtttttttctgtcttcatggtgaatttatttgtgtcaatttgggtcccatttgactcatcaccgaaaatacatggttcttgtttaatgtaataaatagctcctggacaaatgaattttacagcagaagtttccatgaatcttatttttttaactcctctactttcagtcctttttatttctgataatgaggtgaggaaataatttatttcattcttgtattgcatactttacaaatatcttagggtgtctctgtgttaaagtagtccctataacacacaaatgatttctctgttgaatttctatttctgtttctctttgcttttcctctcttgggccactgactagcattttcaccaagaagagatcaaagacataggaaggaaataaaactcaaaataggaaatttttattttatactcgttttgttaactagagagtgaatagaaatagaaattgtggtgaaattgggctgtgaagtgacttatcaggagttaagccagctcttgtcctttagtagctttgtttcatcctggccacagtgtcaccagtagaatatagtaaggagatctaaggagaatcttaaaatataggaagaacttgtggtatgtatgagctaagatgatagtttttccacatggagaataacaaaagattctgtggatagtggggaggattgactcttctccacttcgtaagttaaagaaattgagtttgctgagaacttaatgattacctgaaattagtaaaggccttggcctgtgtcttcttgccctagtctttactaactttccaattattaagagaaaggcaaaatgactttccgttttttaaagaagcattggaattagtttcagtttaatatgtaatatttaagtgagcctcagggagtttatctattcaatgtctacatgcaacagcttaaaaaaatgaaattcctaactcctattatgtagacagttgtgatttaataatgtttaatgtattaaattatacatagttatttgctagtaaaataattattgcagtacttccggaagactgaaatgtttatctgcrtataattgcctgtctcaaaattaaatgctgtattgttttcaaagcagggaaagctgagggctcctttgtgaaacatgcatagcatttcactgtgtcaaatcagaggtccatctagcccaatattctgtctccaagaagtaccaaaaatcattactgccagtttatgtttttctcaaacctggaagkttggaatatagttctaaataccttaaattctctcaataacatgatctggttgtacagwccacagaattgggtaaccatttcttggacttaattatattatcatatattatctttttgactaatgaacccaggaaattactawtcacaatgcaaagtaataattaattcctttaattattaaaaaacacctctttcaaattataaggcatacttcccctgaaaatgatagatattctaatagttaaatattctaagagtgtgatttaattctcatgtcatttatttaacctgagtcatattatagcttaatctttttcttcccaatttggaaagtgttttgtcttgtttcaaagtctggcctcatgtggatgcttctctagtcttttcatcatttttggctggcatttactggagattttcagaatttgttttaccttttctggggtgtgctgacagattcctgcagatatggatgcagatggggctgtgaatgagggtgaatgatgtcctctgttttgctgttaattgtgtctttgatagctgacctatcttgatcctttgttcatggtggcatctgtgctgatttcctcagataattgtctgtggtgtttgccaaatcacttatttcagtgataattgcagctttaaaaaacagtctcggccgggcacagtggctcaccctataaacccagcactttgggaggctgaggcgggtggatcatctgaggttgggagttcgagaccagcctggccaacatggtgagaccccgtctctactaaaaatacaaaaattagtmgggcatagtggtgggcacctgtaatcccagctacttgggaggctgaggcacgagaatygcttgaacctggggggcggaggttgcagtgagccgtaatcatgccactgcactccagcctgggcaacagagtgagactcggtctcaaaaaaaaaaaaaaaagtctcaaaacatagactattgtttcctaaatgtcttatcacatatgtgcccaatcgacccttccagtagctcattgggaactcctggtaacttatctttattggccagtgtagctgagtgttatttttgtacactttttgatttctttctgcacttcccctgtagagttcatcattttctaagattaaatgaatgggcaaatgagaataatatagtacatgtcccttctcattgttactcagagaatagttgcttattatgtgtttaaattgaagaagactcatcctaaaacccattaaggaaaaggaataggctacaaccaaaaggaggaagggcctcacagtggcatttcttcattcataccgtgtttatttaacctttgcctcactgtcttcagctccctaggttttattcttgatgcttttgcttttctttcatttcatactttttcatgtataatctctgtttacaactcttgatgtggcccacagtgcctagcatgctccgcccacgtccttctgcttctgctcggtgtgcatgagctgctgcttgttaggaggtctgcattcaccactgctacttgcctctctccacagaggctgggactctccttccctttcagtttctcctttcccctcccacctttgcttacctrcatcatttcaaatcatcttccagatgttttgcgcccgttgcagcactctccccttctctaattagagacaacttaatggttattcatttcactagtatagagacttagagcttgatttcataggtcaggcatctacaaactgtgatatgaaaggagagattgctagggacagacctttaagtggagtggctgccaaactcctgaagaagctcagtgctttaaggaagccttycctatccagccaactagtccagccccactgtcataaggccacagggtaccatgttcttctccttcagagattctgcatgtggtagatgcctcctcagttcaccagactataagctctacaaggttagagttcatatctgcctttgttcaccattgcctcattagtatacagcacagggcctagcacatagcaggtccccagtacatatctgttaaatgaatgaataacttccaaatacacaaatctggcttgcaattgctcctggaatatctcttttaaccacaaatccctagtgtaatttagttagggatttctctctgccatctcagctccacttgtgaaaaattgtaattacacttctttccccagggtctttcctttctagtgataaataattctctcagttgtcctgtctcagaacttttaagcaatctttgacttcttgctccctttcctaatcctgctggtcatcaagttgacattcagctatagcccccccaattttctatgaaaccatgttttttgaattttcctctgccgtgctttttgaatctctttatcctgcctcacctcactgccactatgaaagttcagaatcttgccacctcacctctgaatgaatgcagtaggtcttcacatggcttacagggtctagaccctgcctttctgttctgccaagactgtcagagagcctttcttaatgacactttccatatggtgttgccgtgttggtcaattgatcaggcagtattcagtagacagagtatatacagaagcatgagcaaataaccttaaaagtttatatgtgcaggaagtaaaaatgtgaaaatatactttttgtgcctaattactgcccacaaaaggtcaggggttttctgggctacctgttgtccactctcctagttctcttatttttatttttattttttgagacagactttcgctgtgtcacccagactggagtgcggtggcagaatctcggctcactgtatcctccacctcctaggtttgagcgattctcctgcctcagcctcttgagtagctgggactacaggcgcccccgccaccacacccgcctactttttgtatctttagttgaggtggggttttgtcatcctggccaggctggtctcaaactcctgacctcaagtcatctgcccgccttggcctcctaaagtgctgggattacaggcgtgagccactgcacctggccctatttcccttattttactctgttaaatgttgcttgagtctcattttgtattctacctatcgttccaaactgacatagcagtgcatggctctaacattagtcccaaaacattctaggaaaaaatatataccagttacataggtaatgttttccatctcccctgctgtctccatttcctacatgtatcatagagtaaaatcatgtatgtgtgaactctgtggccacccaagggcatctatttttaggtaatacttatctggtaagttctacagatgaaatcatttcattagagggatagaggagaataagagcaccagagtgcagtttgagcactgggggttagtgtggttaggaagggcttcatagaagattggggggctatagctgaatgtcaaagaatagataaattttgaagaaatgaaggaaagagaactcacagtgaggtacaaacaaacaaacaaacaaaccaaaaaacccaggagctgaaattgaaaggtatggtttttggatagtcccacttgatccatgtgaagaaatagtagatgagattagaaagttagggtaggttagcacagcttgtggctggtttagcttgctagttgttttagttaggactcttattggttgcagctactgttgtcagccagttgaagcagaaaaaggaagttttagtatctattattttttgggttttgtttttgtttttgtttttgtttttgtttttttttttgagatggagtttcgctcttgttgcccaggctggagggctggagtgcaatggcatgatcttggctcaccacaacctccacctcccrggttcaagcgattctcctgcttcagcctcctgagtagctgggaytacaggcatgcacctaagcaaaggattaatttcttaactcgggaaaagagggcttgctgaatttcagaaggtatgggagacacagattatctccctgttcatctcttattcatctctgtcccctttgcttcaccgttctgtgtctttatctctctggctgaccagctttgtttttctccaggccacacaacaagaggaaaatgcccatgtgacactgctcctgattttatacatttgacttctttagccacctagataatagattcctctctttttcattatctcagttccagatttctagggacgggaatgttttcagagagtcagggtcacaaaacagaaatgtggctttcaggagccacctctgggagcctatgaattgggttgtgaggagctttcaagcaaaggttgagggtagataacccacaagtgccctctactttctactccttcccttcccaggacatttttaacctgccagttttatccagcacctacccctccctcatccttcactttataatccagcctatataaactagcatatatcaaggaaattgaaaatgcactcccccctttcctaattagagacaactcaatggctattcattttactactatagagacttagagcttgatttcatagrtcaggcatctacaaaccgtgatctgaaagtagagattgctggagacagacctttaagtggartggcagcgaaactgcaaagtaagaggaactcagttcccctctttatrtaaactcttgtaccaatttttggcctccctatacccatccccaagctgaccagttcctattcaagggacccagtcttctcttcggctctcaaataccaattcaaatgcaaattgctttctccatttcctgtgtgtagttgttagataattgtctgactaatgccctcaattttgccaagattagtgtctaggttttagctctttaaaaaaaaaaacaatgttcaaacatacctgcagaaagacagtcagcaatcaataacctagagcccagatttaaaacttggcaagctctcttacaggtattgagagctcaccaatggatttctgatcaggtaatgatataattaaaattgtactggtgatgacagatcaacygtgactcaggtgcttggaggcagggagaccagctatgaaacttacataaaaggctggagagacacttagcaaattgtggttattttggggcggcattacacactatttttttcatagcttaaacacattttccaaattttctacagtggatacttatttcttttgatttaagaacaaatacatgcatataaagcctgaaataatagatttggcttgaaataggcatggtggcagggggaaggatctggcctcttctttctgacagcttgcattgttctttagagatgagaaaatgcctgtcttcgccacatgtattagtgattaattccagaaaatggctgtgttcctggtcagcctctcctacagtaaactgagctcagaaatctttgtggttaacagtacaaaactcgttctggagactgttagctgcttgagttaatttggtcagagtaattcctcatgtaaagcagcatttgtgcagtgacttctatccagaagacctaaggagctaggacaagactctgctttgcatcacaggggtaattagaatgttgtcgattgagggcaacaaccatctctgagtattctccaagaytgcttaggggttattaagcatcttaaatccttattttgcacttagagcatctgtagtgcagaaattctagactcagtgtgagtagaaacatagaagcttttgtggtccacttcatgcttggccaactctagatggtaatagaaagggggatatagtggttttcctctcagtagttcaattaaatgcttattctccyccttaaaggtactatttattgagcatctactatgggtcaggcaccaaatgcttgagatacgtcagtaaacaaaacaagagcatacatggtaaaggagtatgttagaaggtaatacataaccaccaattaaataaaatagggaggatcaggaacattgcggaggggaatggttgtggttttaaattgggtgatattttagcaaacttgaaggaaatgaatgagtgagccaagcagagagctggtggaagtacactcccttcagtaaaagcctgcgtggcatgttcaggtgacagaagagggaaggacagtgtggctagaakagagtgagcccagagttcaaaatttgaaatagcaatattctagaaaaagctactatttctagtcttttccacattttggaaatatttacttgtaatttcaataaaccattttcaaataaatgtcttggactaattgcctcttttgtcactgctacaagatggggctgatccccaaccaggaacacctctctctgccacaccacacacatcttctaagactagggctctctcctgatcagaaggcttcaagattcttcaccagtggaactcgaagtcttaaggctttttctaaagtagtgttcttaaagtttcagtcttaaatatagatgagggcttaatagagattccaaaattttgatttgtaaaggtacagagattctgcttattatcttacatttaatcatcacatttcagttgtcttagcaacctacacagtattctcatttggttttcaataagccartggatgaatgggttctttgttcacgtgtttatgaatttctatcacctgatacttgaagtctttcaggcatgcttactgtgccaaataactgtctttatattcctaaaattcatgtagctaaaattaagctctactttttctaaatatttacatttccaatgagagaatctccaacataagaatagttggaaaaatgtatatataagcttgtrttttttttttttttttttttggtcatcgaatgatttaatccactcttaaaattctagaaaaagttatatcaaacaaatacttgtcttgcttgggtagtaagagccaaataatacaggtatctttagttcaacagcggcacctttataagcttgtatttaaaaaatacttttgctttagttataattaatttccaaggctccacagacttgatggcaaactcaattgtctagcaaacctcacccatacagacatatttgagaattacagagagaaaaaaaaaagcctatgacaaatctaggcttcatagaggtatctctgagatgttgtctcagaatgttttgtcttactgaatgcacagttttaaattctaagtgaaggaatatatcgaaaatgtttaacaaagtacctgccactgtattatgtgaatttaaatgactgctcttattacaartaggcatagtgatagtattgacaagtgacagtctaatgacaaaaagacaaaaatagcgaagcataaatgtaagaatgcaaaatgcttagtcacatgagatattttggcatgaacactggaagcccagtatgctttagtaatccctgaggacattgatatgccttagtactgtgtgatgattctcactagtgttggtcaccctgattttctcagtaaaagttaaattacatttaacatcataacattttagaattatttatatacaaaatgatcccattaaaatattttagaattatttatttacaaaatgatcccatttaaaatatgctattgcttaaaataaccacagctcagcaacacacaatatttgactaaaccataatgaccaaattccttgaaggttctggatagatgaggttatctagaattattcctttttcatgctaacatgagcaactcaagcatctggatcacttagggattttttttttttttttctccaatccaggtcaggtacctagcacagtgtgtggmacatagtaggagtgcaataaatatttataataggaattggtgaatgaatgaatgaggagctagtttttatattttggggagagaagtggcaagttcttcaagtctttacctacactagtcgcactacygtatgccatataagaaggtttaaatgtcatctgtaaataagatcaaatctaaggaagacctctaagtttgggctgtggtggctcccgcctgtaatcccagcactttgggaggccaaggcaggcagattatttgaattcaggagtttgagaccagcctggccaacatggtgaaaccccatctctactaaaaatacaaaaaattagccaggcgtgstgttgcgtgcctgtwgtccctggtactcagcaggctgagacagaagaatcgcttgaacccgagaggtggaggttgcagtgagccaagattgtgccattgcactccagcctgggtgacagagcaagacttcgtctaaaaaattaaaataaaataaaaaccctctaagtttgctctaacaagtagagtaactctgtatcccagcttaccccaygtagagtcccagtttacacttggtatctcagcatcccttttggatagagagtttactttcaagaaagtcttgtttgcatgatgaatttaatggttattctaattaaagtcatcacgtccttaccaaaggtttttgaaataaaaatgtaataatcaagaatttccctttttctgtctcccccttctyttctcccttccccttctttcctatcttaggatgacttttaccatgggcattgcacttttatctttaatacaagacaatatgtgaaaaagctctttgaaaggaaagatgacttgggaaataattgttccatttttttaggcttggcttccataggaagctcttctaatgcattctgtcatgtgattaatttgtcaaaattccatacctgtcagaaataatgtaatcttttcaagaacatasacagtcttattacatgaagtgatgtaatcctatactatttatctcctctgtattcctcattctcttattttctattattcttcaaatagaagagctaaagtcccaactaatggggatgttagagatcatgctagagcctgggaaaaaatgattaatgtggtttggtgggatgccaagacagatgcgccacaccctgctcggtgcaacagctgttgtagtaaagactgaaggcattacataggagcatcatgtgtgacatcgaacgggagacaaaatagtttactgtggctgagacactgacatttacatattcttaaccattatgttatgtgtgtgctgttggggtagttattatcctaggtttttctcattatttataggtgtttgttttaaagagaaacaatgatgaaaaccatggtatagagaaaaaatgaggagagggtgtgtttgtgtgtgtgtctgtgtgtatatgtgcatgcatgcaacatgactggaagtgtggattacccattggtatttctccaaaggggatttagaagggttaattctttctgcgcagggctgacagcacatgacacaactatccaaccatgccttcttccagatctcagtagcagtyccagtcacagtgagaaccccaaactccctgccgtgttttcacactctcctggctacccaagagatgcatgattttcatcagagraagatactgtrtatcctaaaaattcacatctcatggacttaaaaagatctggaaaatgcaaggcttagaaaatgttagtgaagcagacttttaatggcccagaatgaatcactcaacttggctggaaaaagcattctcttctatagcttctgacaatgaaccatggcatggctgcccagatacttaacattgcaatgagggcatccacatgacagtataggcagcaaagcacaacccctyaataccttagaaaagcaactcacagttggtttcccagtaacatcatttgactgtaggtgctgcttagaaagagtcaataagctccagatcctgaattcaaagccttttcctgacactggaagaagagcagtgtgaggcttcarattgtttccaaaacrcctacatttccagcatcttttctctttccattccatttccaatcagctgcattccatctagcaaattcttgatattagggcatacagatttttagaaaattgaattttatttcatggaaaggttatttttttgtgcagttagaattagtgatctttgaggaatattgggaatagttggcttttcacatattgataactgcttcttgatttattgtttatcagtgctctaaacagggtttggaaaatatttggaactgattccttttatttgcatatatgatatatccccatgtgtattagttttcacactgctgataaagacatactcaagactgggcaatttacaaaataaagaggtttaatggacttacagctccacgtgcctggggaggcctcacaattatggcggaaggcaaaaggcatgtgtcacatgggggccgacaagagaagagggcttgtgctttttaaaaccatcagatctcgtgagacttattcactatcacaagaacagcatgggaaagacctgcccccatgattcaattacctcccactgggtctttcccacaacatgtgggaattcaagataagatttggatggggacacagacaaaccatatcaccatgtttcttacagtgcattgttttgtgtgtcttttcccctatggccatacattgtgaatccatttagttaaagcaactgagtggccattaaatgttttgtgctaaatgtaagagataaaactggaaaaaagaaaagggggggaggacagtgcaagatatcagcccttgttgcctagtcaagaaacagaggaatcgtgaaagaaagcttattttccatgtttgcaattcctgggaatgaccaaactggttttgcaaaccatgtgaattgagtccatgtgtatgctaggggtgagggagttattgagactagtttatttgagatattctgggtgtcttttactttctaaatattcttactccttttcttatgggggaaagaattttatgcaatagactttcattaaattgaattttcacaaccaaattgaagctgttatcagttggttgaactcttgctaactgaatgactataaggacaggtttcaatttcttcttatttaaagagtctgatttttttcagctgctattttttttcctcatattttcatgttgcctttatccagttggctgtttacattgtcagtaataagagttagaacttctaagtgtgacatgtgttttttatttcaaggacttctactaaaattgtttcttttgcatgcatgctatggaaggcttgcttaaaaactttgagaagactctaagtagagcccagaatttcgctaagaatgtggaccttttctttggtaagttggccatcctgtagaaagcgaatggcagtttcctaaagaaaaccctaatatggcttctttgaaaaaaaattgccaacatgcagtgccaaatcgtatttagtaaaaccttgtccccaaataaaaccagggaaataggcacaaagaagagaaacaggatacatcagtgcatgttgcaggagggttggatttgttgaaagattaatcataaagtatgtggacaaaagtgaattaartaagtataagatacaatgtcactacctatttattcatcttttagctaaatatatgccttcccatgtctgcggacttttcctctcttattttgaccagcgccagctcacctctgctggtgcccacactggatcatgctaaattcaggtcagcatgcaaagggaatcagcctgcttagctagtggattttctaggcataatttatacatacatamtttttagtgtcaggccaagcattttcatttttataatttcttctttctgatagtaaaccatttaatttggagcaaatataaatgattcctaatgaagcacaagtgaacagaaggaaattacttttgttaaactagtacttcaatgtatttttctctccctttcaagtagaggatgactatgagaaactgatacacagtattattcattatctggttagttcactagatcaagatgttgatgtgtggtgtagaaaggtggaaaaagttagagagttaaaaacaggttgatacaagctgttgagaaaaaaaaatacaatgaggctacttatgttttaaatcaagaatatgttttcagtgaaaatactctctaatgattcacagaagaatgtcaacttggactacatctgctgaaaatcaaagtgtaagtagttatatggcattgaattctggcaggagtctatgctgtgatatgaaacgaaagttcccatcaaatgacaatactttatttttctgcctttaagagtagttttctgactttaaaaaatgttaacagcattttttctccttcacattacaaagataaattggcaacgtgcctgtatgatttccagagtaggtttcttaaaataattttgatgggaaggtaattgtttaatgtcagtgtataaagttctcccatagtttaaacaaaattaaataagagaaaacacaaagaggaggttttgtataattactgggaaaacatagaaggaacaattaggtagttagacctgaaaagaagtgaactagggttttcaaatttcatactatttatagggttccttgcattattctctgacatcacttgatttttttgtttctgagtttgcaaatcagaatagcagcatatttatccattaatacatatttatagctttttgcacttatatattttctattcaagagtttcatgataaaatgaaatacactgaatacatattatgtgcaaaacaacaccattacaaaagtatacactgatacagatgcgagttagaaaattatatgcggtggggcgtggtggctcatgcctgtaatcccagcacttctggaggccaaggtgggcrgatcaagaggtcaggagttcgagaccagcctggccaacatggtgaaaccctgtctctactgaaaatacaaaaattagtagggtgtggtggcgcacgcctgtaatcccagctactccggaggatgaggcaagagaattgcttgaacccgggaggcggagggtgcagtgagctgagattgcaccactgaactctagcttgggtgacaaagcaagactgtcttgaaaaaaaaaaagaaaaaaaaaattatatgcttatattgcaagccgctttgcataaataatctgttctaatataggattcatttagcaaaattcatgaaaatagacatagtgtttgtgccctgaacatcatattgaagggtatcccagtcaattaaaggatagtaataaagtataaaaattattattgattaccttatttttttacagtgttatttttaaataccttggagatatcttaaattgttatttagaatgtacaatttaacataaatttaactgaagttgggacctgcttttttatgttaaattgtagactttttcttactcaattgccataaattctaataaattctaacttttttgcataacagtggagagaaagtttgaaatggttcatatgagcagctttgattttggaatgagactggggacacagctcaaggtttcctattttctcctgtccctctcttctggaatcaacccaagtgcccatagtgaatgaatcggtaaagaaaatgtggtatatgtatacaatggaatattattcagccataaaaagaattaaatcctgttatttgcaacaacatggatagaactgggggtcattatttaagtgaagtaagacaagcacggaaaagcaagtatcacatattctcactcctatgtaggagctaaaaaagtggatctcataaggatagagagtagattgtagattggtgtttaccagaggccaggaagggtaggaaggaaggagggatccaaagattttggttaatgggtacaaatataaattagatagaagaaataagagctggtgttcaacacgtcagtagggtgagtatagttaatattaatctattgtacatttcaaaatctctaaaagagaatrattggaatgttcstagcataaagaaaatacaaatatttaagatgatggatatcccaaataccctgatttgattatatgaatgtatcaaaytatcacacgtaccctcaaaatgtgtccttctgttacgtaccaactttaaaaagaaaataacatcatataacaactatagcccttagatgcaaaaagacctgagtgcaaatatcattccctttcttactaacatctaagtttcatatagtcttttagcttcatcstttaaccccgaaatctggtaccatcctcttctattttcttgatgactaaattagatggcattatgtgtactgtttgacacatagttaacactcaatgaaagatagttatcttcagcctttgtacaaataactctagagaaatattagttgacctattgaaatgtggcacaatccagggctcacccctctcaggatcattagcattagattgagggtatttccctgcrtacctctctctaataccagaaactcaatattttagtagtcacagggaaaagatgatagcaacagtgccatgggtgaactgtactctttttctgttctttgagcataaccataatgaatcaagaggaaaaggggaaggaactgaggagttgcccaccagctgtttctactgactgtgggaggaatttcctttgctcttttgttctaaaagatatctagaycatttcagcaaaaacccatatttttaaatcaaaaaaaagatctatatgattctagggacacagacacacacacacatacacacacacataccccttctttacaccattgtagaattgtaaaattaacacgtacagctaccaaagattgcatcatgacacagaaggatttctaatggcagtacttaatacctctccaaaataccttaagagggaaaaccactttggtacatctgttgtcactgagtggtgagcacttcttatattatctttattctctaagtagttgctcttcgttatttattcattggctctctaaatacagcacttaccctttttattccctgtctgatttctaaaaatggaacattcataaaataactcagtattatataaaaatttctaaagtgagaatctagctatatatctggaggcttaaactcacattgttttgttaccaacacaaatgttgaaatctactgaaagagtgtagtcaacttttccctgagcaaattcattttgatgaggcactgtgggaatttttgtctggaactgggtgtcatatgcttacatctctgtctaggctactgattcagggagctgtgcaatataaagatgaaatgtgatacacacacacacacacacacagccaggagaaataaaatgtgaacccaaaagaataacagaatgaatctatttgcaaatgtagtaaattcccatgtttatagagaaacaagagggagggtaacaggggacaagaccagtaagaattagggaagcacatggcttatagaattgttcattatctgatgtttccatgaattgtgacactctaggagtggagtctcagcccctccagcacccactctaccaacttgggcccttcagtgcctcggttttatcatggggctaataacaatgcctgctttctacaattgttatgaggattaaattagctataactaaaacacttccagcagcatcaagtgctatttttattatttccattactaattttgtgtttatgcattttgtggaaaaggaaacatgaacattgtgtggttcaaatagccaaaaaaaaawtaaaatgtgattacactaaattagaatttatgtgattttattrcacctgaaggttaacatgattctgggattctaataacaaaaaagctttaaaaccatcttgatttgtttatacagaaaaacaggaattggcctgatagagaatgaaaactatgaaatagctggctgtcttgctttattgatatttttcacaggctttatttaactcccaaagacctagcctaaacaatagtatttttagaggacatagtcacataaataatctttctcattttgctctaaatgcctgctttaaccacagggggaaaaaatwcaactttgttcttgtatgtttaagtcaaagatagtacacatagtatataatgttaattccatattaaaatgaccatttgaagaaagtgttcattaagaaagattacatttacttcaaggaattttcttgatatcaagcaatatttatttttcataattgagcttatgtgcctaaaataatccactcaaatctggataaatcatagtcttctatttgcacattcatcaactaaactctcatataaggaaggaagccactctacaagtcatatttctgaactgggaattatcttttcctgtcatgttttttgtttttgtttgtttgtgtrtttttctttgagatggagtttcgcctttgttacccaggctggagtgcaatggcrtgattttggctcaccacaacctctgcccccrgagttcaagcaattctcctgcctcagcctcacgagtacgtgggattacagktgtgcgtgtgccaccacacctgggtaattttgtatttttagtagagatggggtttctccatgttggtcaggctggtctcaaactcccgacctcaggtgatccacccgcctcagcctcccaaagtgctragattacaggcgtgagccactgtgcccggcctcctgtcatgtatttttaacaggagtgtctcaggaatttaagccctttatttggactgactcccctgttcacttatttttctcagttcagtgagtgttgccaataagagagagattagacaaaaaagacaaagcacatcatctcttttctaatgtggatgttactcagtgatgaggggagagcagataagatccccagttaccaaagcgattaataacrtcattctgtccattcacactcattcagccagtgtttattgaagagctttgtttgtctctgtcactgtgatcctacaggaaagacaatacctcctcttaaccaaggttgacaagtagctactcctagtttaataatttttgtaaaactttcagagctgttttttttttcgtattacaaatttactacattggatctactacactgtagaytcttcagacagaaaatacatatgktcatgctaaataaaacaaaaataatctctagtttcagcacccacagtcttctagtcatagagagcaattccarttgttggcttgaatagtaaagcttttttctaacacaaaacatttgagactastaacttcctatgcatttagttatcagttaatgtaagtctgtgtgtaataaatacgactttcattgagtttcgggatgtccttcgtgttcacgtgtagccctgcctcatcacccaccttaaagtggattgcttgtatccagtttctrgtctccttggctcttcgcatgaggagagagagaaatgggaaaycctaattccctgttcacttgattcaacatctacgatttcattctattttaaaactctaccctggcagtaccctgcttactcattcgtagctgccttcagacatgctattctctgcttgaacayagtcgctcttagttcctcaacttttattttctcacttaagagcctgcttcactgagaatcatttcctagtgtcatgattctgaggtgccttttccatccactccttcaggctcctgtgctcaccatgccatggcctcaacacactgtgctagaatattgttttaccccctgactccctaactggactttgagttggtaggtagcattttatctgtcttccaaggatcttagccatctcctggcacatggaagtggtcataaaatatctattggatatatgaatgaataaatggactgacatcttgtggcaacatcctttcccccagtaaaaaccagaatggaatatacttcttatagtccagtggttctgactgaataacatatttattttggtagcagaaaatgccattgtttgggaaaactcaaggccatctactaacttctttattcttgcattgtcgtgrtgatgtgactgatttccacagatctcataaaaatcattctcrgtattctatattctatttcctatgtatgaaakgtgaatactcttgagtcattaattcaacaaattaattcaacagttatttattgaatgtcaattwtgttccaggcacaattttaggtggggctacagcaaagtataaaacagacaaaagtttctcctttggggtttacattccagtggagagaggcaagcaataataaagattaatatacaaaacagtatattagaggtggtaagtgcaatggagaaaaagcaggaaaagaagagagagaatgaatggggggaagggggtgacaattttgcattgcctggccagggaaggccttagtgagagctgggtctcastaaggaggaaatgagggctgggtcatgcagctgtctgggagaagagtcccaggaagagagaacagcatgtgcaaaggtcctgaggtgagagcatgtctgttgtattttaggaactgtgtagtcaactggagagcagagagaatgctgctaaattctattatctatctatctacctacctacctacctatcttctatctatctatttagtaacattgtatcagattactttatatatatattgtataggctgtcaaacttcattcatatttttatttactaattgaccaggcagttatttaccacctaccatgggccaggttctatcytaggtattttaaggaaagtaaaatctattagatatagttcttgcccaaaagaagtttacgaaataatcagagataagacacatacaggactcatgacacragatgagctctcataaggaaatgactactcattggccagagaaacagctagagaatgacatctgggcttcttggaagagatggcatcaaactgcaccttgagaggcatacaatgccaacggcacatcatatgcartggtgtaaacgggggcacacccactgagtcactggcagtgcaggatctgtgaaggcaggagtgataggtaaggtcaaaaggaaagctttggtcagcatttgaaagcctttgaatgagtatatattttgtgaattctcttcattaaaaatgttctaagatttgtcatgatgttcagtgccttggtcttcataattctgtgttgccctcacctaattgccagcatattttagttaaattcaattagatatttcagttagctatatacatttttcagattgaaagctgttaacaggttgtataaaacctgtttcttatactttaacaaaataatttccaagtgtactatgcgatttttaattctagaaggttttctattaaaatgaaaatgaaatgtatgaaatctstctcttattatttcagtcttctrtaggttttcgagtgtaaatkagggagaaatgcagaataatttaaaattaaagttacttatagagaaagctgaatagaaaaataatgtgtatatagcatttgtttttctagaataaagtaagcacttatttagcttttaggtttcaactatattgtctttctcttgagcagattttacatasagctggtatgacatatctcagtgtaatacataatatattactaatgtctttaaattcagaagataagaaaaaactttgagatcaagtttttaatttgggaaaggtctaattaaactccttacattgggatatttgagttaattgttaaagtgctaattcagtttatcaaccacttgttatcacatagttttatcaacctacactgtgaaataaaggagtctagggttttttttttttttttggaaggaaacgtatttatcgaaagagatttatttagattattctacatattctctgggaatttgtagtgtttcttaaagttggactaaatgttgaatgggaggataggaggagaaggcgatggaccctacaggtgcaaactctttccaaatcaccagggctttggctsttactcactcacccccgccttccttgctcttggagccttcagatttttccccagtagcttcaccttacagcaagsttagcagaagcagttccacagcatgccaacccccctcacttttgaataatccagagactccctgtgccacagataacatgcaatcataaatcttctcagcttcagcarttttcgtcttctaaattcaattaagttgagcccagtaagaatttgtggatcaaacagtgagctctatatagattcaaattcaacttagggttctgatgtttgttactaattttcaggaaaaaaaaataaaagaaaaatactgctgctattttctaaagcttccttataaaggtatttcttattgaaaccaactcatatttctyaaattcctagaccactatctgtcatgcaatttgagtctgttttccaaatggtagagtgccagagaatcaaaagctgcttgttttgcttgcctgattttctttagcattctttggaggatttaaagtatggggggaagaaaaggaaacctgacttacattaagagctgaacatgaaaaagggattaggcaaagctttaactttttcattatgcaaactttcctgaactataatacatatctttatagagttttattaattgttggggctgcaatttggattttgctaaaaagtatttactactaaaaacttcaaggttgttactaaacacatcaatcattttacatttggcccctttgcatggtgaacagaccgtccttcctccatcttttgttggggaatacctggctgaaggtctcagtgaaaagctaggaagatactcctcctctgagggagacatctggcttcttggctgattccatgcacacttttgttaatgggctcagattccccagaattcttttatgtggttacattgtagatggactgtctgcatagtcttgtcctcttgaatgatttatgtagaggttaaaaatacatatatatttggtctggttcttagaatctacgcataagattaaatgaatctcagcaagttcagttttggaaaaaaaaattaaatttattattacaaaggcaatctagtagaggatgtagattctcgagccagaatgcttaatttgaaacatggatttrccacttgctagctatacagtgttggacaagttatttaatctctttgtgycttcttggtttccctaaccacatacaggatgataataacaatatctacctcatatgtttccatgaggtttaaatggtttacactgtcaaagcttttaggacagtgcctggcgcgactaagtactcagtgagtgttagtcatgatgtcatgattattcatggtaktcaccagacaagaatatgttctcatttgtgtatgatttaggattaaatttgggactaatattgagtggttcaatgctaattttgataaggctcatggaggtgtgtggtcacttttagtggagagtaactttaattcctttttacatagtgaaaaaaagagttcaccttccactcactagacttgattttgcagactccctgttctgatctggattttattatgagtgaaatgaagttagtgactcagtggtccataggtcattagtctgtagctgctctgttacatggaaaagtcctgaatgacaaaggtctactcaagggtgggttggcaaggtaatttagaaacctgtattattcccaaccaaaattggagcataaaaccttctattcactatccaaaaaggaagtgaaatcagccccacatagagatgtatgcactcccatgtttattgcagcgttattcacaataaccaagatatggaaaacagttgaagtgttcatagatggttgaatggataaagaaattgcaaaatatatacacacaaaaaaagaagtgttattcagccttaaaaaggagattatgccatttgtgacaacatggatgaacctggaggacattatgctaggtgaatatggcagacgcaaaaagaaaaatactgcatgatctcacttatatgtggaatacacgtactttctatagatagatagaaattgtatataatttctgttcccttcctcagggtaatttaaatggatattttaaaatagagggctattaagctgttgaaacatttcaaatacaactataacctatgtatatctctatatgtggaatctaaaaataaaaaagtcaaatacatagaaacagagggtagaatggtagttaccagagatgggaggagggatcaggaggtgtggatcaaagtttacaaagttacagttatgtacgatgaataactctagaaatctaaagcactggtgtgaagattatagtcaataatactgtaatgtataccagaaatttattaagagtatggatgttagaaaatctttcacaaaaaagaaaggtgactgtgaaagaaatgatatgttgattgtcttatcattttactaagtatatgtgtatgaaaacatatgttgtacaccttaaatatatgtcctccccccatataaaatttctgttcccttcttcagagtcatttaagtggatatttaaaaaatagagttattaagcttttgaaacacttcaaatacgtcagcctatgcatattaaaattktaatgcagcaaatttactaatatttrcaaaaccagtttagayagagataatatatagatatatagtcagattctgaccatgtcctaagtgttcttagtatctattgatgaatagatttcattaatktaatgagatgatagtatactaaaacttgtctaagtaaatggttggygtccttgaaacttcctrttgaatacaacatgagtaaaatgttcgtgtaaagtaaatatttttcaaatagggatgtgttattggtgtttcttaaatatagattacttgctgctgctttttaaattggatataaactttaaagtgaacagcattgtaggaagttgaagaggaagaaaatatattatttygagaaggtattatttaaatctatataaatccaacttaatwaaggacattggataattactattaaggtcacaaatttataaaaatttacaaactaacatgaagtttaacagctttattcaagagtaaagttcatgaattgactgaaagagctcctcctaaccaaaaaaaaaaaaacttctgtatttttccatagaactaaggtcttttttttttttttttttttttttttttttttttttttttttgagacagagtctcgctctgtcgcccaggctggagtgcagtggcgggatctcggctcactgcaagctccgcctcccgggttcacgccattctcctgcctcagcctcccaagtagctgggactacaggcgcccgagaactaaggtcttaattccttctatcaatcatgtgttttccccgtttgcattgaaggctccctactctgtcctgcagcagcagtccctcctgttggcagggcttttctctcctcctgggggcttcctgcagtccacttcaaacagggctctggttccctagcgggcctgttaaattattaccctcaggtgttgattcatccttggcattgttgcattttaccattttgtagtcttcaggcatgggggaaggggaagagagttgaagaagatcaaagtagcagtactgaagttggagctttagaggtggggatgagccctcagcccctctgctgttcctccctgcccttcccccgcctgaccccagcctacccccaccaccccctgactttctgccctctcaagcctaatcagaagacagagggggctatgtgcttgaactgtttacttacaagcactttatttttacttttgcatacaagcaacaaacggtttaacactacatgatgttttattgtatagtacaactgtataaacagaagataacagatgaggacttactatttttttgattcggtggtttttgaacatacactctattctctgtaagacactgtgggggaaggttatgatgagcaagagactccytgttyccaggcagtgctgagtgaaatagttaataaatttttatggagcgggacccaattattacttgtgttatagagcacaaatatgaaactccatgagaaaagcacatcaaagggaaacaccagcatggtttttaaatatctgtaatcagtaaagtattgcatgttctttttagaaaatcagaaaatactcaatttattaaactaaaaacacagtcactctacmcagagttaaccacactttggcacatttaattttccatatatgtgtgtgtgtgtatctgtatatctgtctatctayatatatatatattyggtctttttttaatttttgtttcataaaatgtatgactcagtctatcttgctttttaaaaactctacattatcttatgaatatttcaccatagaattgaaagttatttgcataatatatcagagcacataataatttatgtatgtaatcattttcttatttggggatatttctgttcctttcagaatttrtcctcttataaataattcattgaatatatttgtgcataaatcttctcatattcctgattttcttagagtgaacttctagaaatgcaatttcaggtcaaaggtcatgcatattttaaagctcctgaacattttgccagatagcattccatcaagcttataccattgaaaagtcaaagccagcatggcagaggagttcttgtctcatgcctgtcagcaccttgttttgtcattgtaaactataattgttgctgttctgttcccttcttcaaagtcatttaaatggatattttaaaaagtagagggttattaagcttctgaaacacttcaaatacaacttcaacctatgcatatctattaaaagtttaatgcagcaaatttactaatatttgcaaaaccagtttagacaaagataatatatagatatatagccagatcatgactttcatgatgtaagtgttggttaagtaaaaattatgagttttttagtttggcagatttttagtttatttttaaaagtacaatatgcaaacagaaaattatacatatcataaatatgcagttttgtgaattttcataaaactggatacacccatgtaatccgtacccagagaagacatcgaatgtgatcaattcccagaatcctccctcatgccctcttcacaatcataccccttcttcctgactttcaacactgtagatcaatattgcctgtgttctactttgtataaatggaatttcgtgtaatgtatgtattttttgtgtgtctggcttcttttgcttaactttgtatttgtaaaatttatgcattttgctatgtgagagcatgtgtttgttatagtctccattcgtttttgttttgtggccctaatgttgagtgagacctcattaagatgtcatgtcttgatacaccttacatggtctctgaatgatctttgcttgtttcctattcagcatagatctcatggctcaccttttcaaccactaatcttccaacagtcttaagttcctgtctccttttctcttcatcttctttacattgtggcctttggctgctggttgtttttgctgtcctcttcatyrgacttcctttggtgggtttgaagtggctatttccatactcaccacagcccagcagctggatgtggtaaggacagggagaacaagcctgcacacctctcttacactcccttccattagatrggatgcagtcatgtgtacacttacatataagagatattctaaagtacagaattatggttgggggcccaggagcacaacttaaatcctatttattgcaaaggaagaaggaaatcataaaatactggggataactatgaaatgtgctagaaaactctaccaatttgttctttattctcagctaggccattaatcctgcctggaaattattctgtttcacagacaactctcttttatttctaatagtatttatttaaaaacttctccactctccttaaacttactatgtttcatcttgccttcatagttccacatttgaaggtcctgactcccacttcacggataaattaaaagcctgtctattgtgcctcattctgtaaatggccaattctctctatatatattctgggtctcctaccatttcagaggttaccaaaaacttttgtgttaacccagtgattttttttttttttttggkcctttactttcttaacctctgctaaatttatcactattgacgtgttaactacttcttaaaatattctttttttagctttctaagacagtatctttctggctttcctgccatcttttgattctctttttttctgatatcatgtatatgttcctcttttatgcttatcccttaagcaatgttgcttcccagtgttctatcacttgtatctttttacttaccacacttttctggggtgacctcttccatacccatagcttgaatacccagtatatgctggtgaatcttaaatctctgtttccagcatagatctcttctgtgaagcttcctgctgactgctggatatctctacttgcatatcccttgtgcaccttaaactcaacatgtccagaattgaactcacatgcatctgcaaagattctcctctttcttttcttcttatcttggtgcatcgtgccttcttcatcacagaaatctggatgtccatcctgattcttttttcatgctctctcctcgtatttaatcaatcacaattycctagaaaaatgtgtcttcttaaaatttctagaatctattgactttcattgatctctactgttactactccagttcatacccataatctgtcaccttggtagtggagtctcttgatcatttccctgcatgtggttttctcttctaatctatgcatccagacatgtaagacccccatggtgtggtgcctgctgacatttccaccttcttctccgatcctccatgttctctatgctcatctccatgtcttggtttttacatgtgttgcccactctgcctggaatgtcctacatttctttgtctagcttctgtttagatttcgaaaaaaaaggtaacagttttctctgccaacaacctttgtctgactcacacactcccaaggtttcatgaagaatccctcgtatgtattccccaaagcttgccgttatgatagattacttagaaaaatgtattttaattttctactgatttgatgttacctttactagactttgagcttctcattcctcactgtatctatagatgttatttaaaatatttaacacgagatacagcattggcatggatccaatagaaagaagggtggggccctttgctatgccaggctatatctcttcaattcactggacttcacctggcttcctcctttctgcaccatggcctgaaaattttccccagggggtaaactggagcaatcatagggctcaccagatttgttttccatttcccagggagcactgtctcatgctgcctgatgttcartatcttgagaaacattattatctgtattttatttagytctttttagtttttttcaggtggaaagataagttagttccctgttactccatcttaggtaaaagcagaagttacaccatgtctgttacctgtttgaggtgggtgacgttatatgtcagttatgracttttattgatatacttagagaataacttaaagatgaagggacatcagaaataagcatttctggagcctttattttatgcyatattttttatgtacatgaatttatttcatccaatttggtaaatcttattgtcctgttttacagatgggcaaattgtaactaaccctgtaactaaccaragttcacaaagctagtcacatccagctttcaaactcaggcttggctgctatcaaacctgcctcctttctcacttacccacactgctggtttggtaaattccagagccttattgtattgacaaaggacctcattactgggtaggtaagtgatccactagagtgaaactgtgccttggtcctgaggtgaagcgagtctttttacctatcttcttttttgtaaaaccctccagtagttccccattcctctcagaataaatgcccaagaacttacaatagtctgaaagtccaatgcagcctagccccccatgatatctttggctccacttcctcctcttctctcactgctyggtcttttctgggctgctggcctttgctctgtctgagcctgccagacgtgcctcctctcacagcctttacgcaggctgttctgtttggaattttcttccctctggtatctgcatgaatgaggattatgagacacatgtgccaattatatttaaattgtaccctgcctcctcatcaacactgtcgatctctgcttcaggttttctcctataatttaccatctcctgacataatgcacaatttacttagttattaaagatgtggggttaaggagttccaactcctctgtgcacttttatgcacttagaatggtgcctagtacattgtaggtgctctgtaaatatttgttaattaattaatgtccaaggtcctgtgccagataagacatctcaaaaaactcatagtctaatgggaggaaacagacacacaacaagtataaaacagcgtggaagggcaatagtagagatatgtatagggarcatcacaagcatttagtttattctgaatggctcaataaacacttccagcaaatggtaawgcctttgctaatcccttaaggataagttggagtctgtcaggtaaaaagaggtaaggttttccgagtagagtgaatctttgtgcaaggatatgggrtcagaatcagcatgccttgtagaggacactaagatgtgatactctgggcagtgagaactcatggaaggatgcttgttaagggagtgccatgggcagatgaacctttatggagggaatactcaggctacagtatcaataatggatttgaagaagatgaaattggaggcaggaaagataatggaaggttgttgcatagtacagggaggagttaaaatgcagataaaggactgactcataaaagtttaggaatttaaagcatcacgcttttttatttgatgggatttggttagtgagggaaggggaaaaaccaggtgactccaggagactgtcagtcagtgcctcttgcacattttttttcctgaagtcaattaataactgtctatattgatcaagtgttttgttgatttgttttgtttgatctattttaaaatccttacaaggtcccattttccatgaggaggttaggaggggaatgagaaagtaagagaacctatctctgcatcactagattgagcttcagatagaatttcaacatcatatagataagataaagcattacgtatatattatattacattgatatcatagaagagcaaaactgcacatgcataagaatttatacacctatattttcgcattgagaatagaggccccaaatgtatttcagtttgcttggcagaaaagagtagaaccacactccttgatgtgaaattgcatattctctttgtgtccctctgctcttcacataccttgactcacacatgaataggagaatagggcaaagcaccatctccctatagcgttcaaacggaatgttctagaaatgagtggagttggccggggcccactgccctctgtggttacgccactgtgggtgcagggtaggtttgggtgtatgccraacacctactgcccatgtgaaggagagcaaagcaatctgttgatgaagcagtttgttgtcattgttcctattctgatcgttatttgaaacagttgtcttggctatcgatttttgcaatgatgtttttgakgtgtcatttgaatgtgaaacttaaaattaagaatattagagttggaagagatccagaatcatttagagcaaatctactgaatttattgatggggtaattaaaggccagagaggcaaaatgatttgctcaatgtttgtggcatttcaggcagaaccaacactagacgttaacttcttgggtcattgggtcacactttggttctctttgcactctgtgagttatgaggcacctagacaaggaaaggaaagccatttttaggaagatgtgtctgttattatagtaggttaggaaggaagattgaagtttagaagatactgtcgtgtttcagacctgagacagtgaaagaggacctgaatagggtggagtgaatgggaaaaagaaagaaaaggtgaatatgacatatattcaatatatgtcaagataaactcataggacttgtgatgagttaggtaatgcagagcatttgtacttggtagttagaatatatatgttctatataggcaaaaacacatacacacacacaaccctcatacatatacctatcacagatacactctgtattggatattcataacatgcatatcactaataaaaacaaaacaaaacagcagtcaaaacgttattttctcctttaatctttgtaaaaacactgagagatattgttgttccctttacatagaaataaggctcaaagggtttaaatgtttgcctaaagtcataaattagtgtgaggagctgaggtgggacttgaagacaagtttcttaattaaaatctgttctttccacaggcgccctttcactcaccccaagcatgtagggtctgaattttcttctgtggtgaatttttaaacctgttatatcagtctattcctttattttaggcagtgcatagtacggctcctcagaaaacatatatcccacaccctcttatctgcttttccagatttaagttgccttaagctattggtttcctctgtttgacagcatacaccatagtgtttagagatgtagtgcrttatggcattaattttgcctggggtctttctygagctattcatccttcagcagctggaggagagccatatacactctaaatctgtgtactacctagcgaaatctgtaaagccaagcttcccatccaggtcatgattcactgcatcctaggagtttgtgcatagaagcttgactcttcagtatggtgtctgagtaacagatcacattcttcatggatgtgacagttgtggcttctctttgggctttgktaggcataggctagactgttagacatcttacaaatctcctctccccacagtgccttasacagcaccttgtctgtattaattgctcaaaaacattgttgaatgcatggttaatgaaagttattattggcattattctgtggacttttttctttgacatttaacatttaaatatatacagatgcatatatatacacatacattatatatacacacaaatattaaactatacatatgtattctccatacatttcaaatatacataattgataagtcagtacacagataagttgtatgaaatctgaaacatgaagttaaggttttgtgcaacatgagtgctttatattttagacagattagctggggaaatggtagtccaggaactaagcacaactctataaataagggcaaccaaatagatatgagggatctagagataaacattttcagtttagaatactgtatatttcttttttttgacatatatttgaaaagagagaaaacggtaaacccaggagcagtaatttctaaagtaataaagatttacttacatggccttctgttccttttgttgataaggatgaatagaatgatataatgccctgttctctccctctagtttctgggccactgttatattgtctaataatatccactcataggacatagggtggcctttctctctttttataagggtataattatccagtagaaagtcaatattcctttcatcaatttttaaaattacttaatttcttttgtttcgataggtataggccctgcacggccttacaaatgagtaagggatacagcccaggagcaatgtccagctgcactgtttttacttacataaactcatgaacartgtgtcagccagctttacacactgtgaccgtgagggatgtattttcccaaacattactgatcctttattgaaatggaaaatttagtttgcatgtggaataatttccctttgcaagtcaattgtgatttattaaatttccttgtccttcacaagatgtcaatggtgttatctcttratacacctcaggacacgtcttgtctgtttgtcgtcactaggccttcatgatatacagcctttatgatatgtcttcctgaactctgaactcttgtaggaaatggattctatcatataaaactcagtatcctccaaatatgcctcagatgaagtagatttcagataaatatttgtaagttaatgagataattttatcctgtatgaaaataattctgaaatggaagacagcatgtagatacatcgtaaatattgttcactctatgtggacatctctccatggcaaaagaagactcagacaaaccaaactattatactaccaccaaaaaagtctgtgcaattaaaaaacagtgcaacacartgcaacaatgcatccagccatgatggtctgaataggtgcaatctcattaaggcagaacacccccatgactgcttcatcttgcatctgtggtgcctagcatggcagccagtacatggtgggcattaaagatagacatttatgaatgaatgaataagacgccccacatttaaaactcagaaaatatgttttatgctattagttttgcttgaggtcccatttagtatgtgttatgtgtgaaggtgggaatagtggcattgtaaaatggaaggagtacatttttgaggtgattagccatagaggaaaagctgtaggaacctatttgggcaaatgacaccactgtgcaggaaatctctaaggagatctgtaattcttggctttagtacaacaccaaaaaaaaatcatccataccttattatgcagaaatttcccattattaagagatgttaatagtgaatatgcattcatattcactattaagagaatgaacacttattcagtatcccctctgggcagagctgattgataaacatcctggtgttaggcaaagactatagaaagaaggggtaccttgtgtaaaatgtargttttctctcctgattatgatttttgccattactacaaacaatatgttgcatttgcatacaacttacaattttgaaagcatcgtctcaaacrtacattattcttcactccatcttccttgttaggacaagagctgtttttctggtttcatacatgaaagcctaaataatgtctctcacctgggaaaaagtagagacaggactagagcccaagccttccaggcatccattctttctgcctgcccacttagacttaaagtaagactctgacagcaggctcttgaatttacctttgcttatattataacaacatccaaagcagggacaaccttgatgaccttgaccaactttaacacttgtgtaaatacaagaaaaatcaactttgctaaasttgtggtgtgcccataggtgacagtaagctaaaatgctaactccatggcataactgcatttgctacatgcagacagatagagttgatgtttgtcatggtrtgagcccagggaatcagacaagtacttctctaaactcttcccactcaacttaatacaaggtaagcaggtcctgcagtagttcaaggacctgctgcacactgtatacagaatagggtactgtttaacagccttttatctgtcatacgtttcttttcacttactactgttactgtagcctgcctccacatcaagcttcgctgcagaaaggagatggatagacacctttaaagaattattcttcccccacttcttccctccatttggcttcctcttagactgtgcctcaagtgaagacaaggctagttacggcctcattatgcaagaggtcagagtgagatgtgaggtgtctacctttctctctaagcagatgcacccaaccaaagtgtgcagaaagaaccactgctgttcctactacacgctgattacagttgcacctggagccacattccagcatcagtgtcattcagatcgtcttagttctatccaagaattcttgtagaacctaagaaggagagctgatcagactaccagcacattaactcaaacatgccacggagtctaaataaatcaagtaatatcatacttgggataagatttaatatactgagtttgtgggcgagccacgatgttttgaatctattccatatgcctaaaatttggtgatgatatgtcttatttagcatgagttctcaagagtagccttagacattgtgcatttccgtgtcttgatatttggacattttcttgtgggtgtcctgaagctcttcctcactttgaggtgacattgaattgcaaagtctagacttttctgaaattgagaattatattatgggatgggattgaaaccatggttttctattgttttgcttaaagctaactttgaacaacaacagctcagctttagaaggtgttttgcctataaaaccattcacataatcaaaagctgaagtgtatgcaggatcagcttaatcaggacagagttatggatagccgtatacttccctagtgtttatagataggattgtgaatttggaagggaaacccagtcagcctaaattacttgtgttataactggagagttcactattctccattataatggggttttgaagatatgatatgcctacaaaactcttttttgtttttaaacttactatcttttttcattagtaaatatgtgaaagttttagtatcagtgctttttgctttgaaagggaatacaattattaattttacccatttcttattatgatattgcaaacagayaacagcagagacaaatacacatgtgtacccacttgctacctatataaggccttataatcattttatattcactatagatcgtaaaaataaacactacagactctgatgagggtctctatactcctctgagatatcgaccccattgctccttgagaaaaacactatcctgaatttagaagttatcattcccataagtgcattcacattatattttagtacatatttatgaattcagaaacaatatataatatgcttttgccagttttaaaaatccacataaatataaaattgtatgcataatgctgtgacatttaaaaatctaagattatattctttatatttattcctattaatacatgtagctctagctcatttattataaccgctgtatagtatttcattgtaattatatggcatagactatgctctcttttagatagacatttaagttatttctaattcttaactcttagaaaccatgttatggaataatttttctggagttgaaacagaaaagaggaatttggggacttagtgcaaggtacttgcttcaccatttattgtgtaatacaagttttaataacagtaaattaaagtattagaatgtgtgcattcaataataacattttgtaaaaatatttcaaagatttcaataaaaattaataaacacaattggtagaatatccctctgcctgctattggctttgctgcctccctagtctttagttccctcaacccagaatacccttggaattgccccttctgacttggctggccctgtaagggcttcctgtcttcctgctgagtgtatgcagctttgagtgaagttctttctgtatctctggcaacagttttgttttctctctctacccaccttgcccactctctgactgcttcccatcccaaaggagagatgtgttttcagatggcacttctcatctctactcagcctttttttggagggtgagtggctagatatgggcgatggggaacacaaagggaaatgctaagacacaaggggttttcatgagtggtaaaatgactggagggtttgcaggaggatcagggaggagaaagagtaaggaaaggggaaggagagagggaacagggaaaaatctaggaggggtggactaagatattatagtttcaaatatcagtatttatgcaaaatacacaaaaatatatgctagtactttaaaatggcacctattaatggaaaattaaaaaccggtgttacagttagtagtagtgtaaacacattttcaactttactagataatgtaatatttctttccaaattggctgtaccaatttacattcccaacagcagtgagagaattacccattttaccacactctagttaacgtttgacctttatttgattttgtaatgtttgccagcctgataggtttgatacaatgtttcattgttgtttaaagttataattcattcactgattattaggactgtagtgaatacttgtccagtgcatttttataacttttataatttttaaaataaattttattacaaaggtagtatagttttataatatcattaaaatcattaaaaacacaagcaagcaaccatcagccgccacataaacatacctcagtttgacatatgtatgtgccaatgaagccgttaccacagtcaagataattaacttattcatcaaccccaaaagtttgctcctgccccttaataatttattcctctctacttattgttacgggatctttggggtgtcarttttctagccagaaacctctgtgaccgtggcgcctttacccaggttcttgtcctgcatccaggaagaatgaggtacacagacaagtgaagagtgaacaagataaagatgagttttatttagtgtcacaacagctcagaggagacccacagtgggtggctcctctctgtaggtrtgtcatccgtggagtgttcagttctcagcagagaggaggctctggagagagtagcctgtctctgcagctggttgtccagatggctgcagctctcagcagagagggtagctcctctttctgctggttgtcctgttgtctctttgcccccttcggccatcctctggctgtcctatgccctgctctggctgagcccagggcttttacagacctcagaggggaagagggaggaagtgcctgccaaatggtccatgggtggccattggtggcccagaagaggcaccaagactccccactctggtctgcaggactggcgtcccagcccccagccttcaggccctcactggcctgaaagtggggccttactgaggaccctcctccttctgctcaagaatcagtctgcctcctactgccattcatggccctggtctcggccccaacccctgctctgatcttggagcaggtgccaggagcagagagaggccaggcaacgggagcaaacaccccccccccagcctataaggatgggggtccttcctgggggcaccgtgggtgccagtggcagagacgacccagatcctgcacctgggagggcaggcacagctgcacccagaagctcccaccctgccaacttggaaggggcgggactcctacttgtccccagctcctgccttctccatggagtgggaggcccaggtctgcagctgtgggtcaggtggctgcagctgcacccaggagggcagattctgcctgttcttggcacccctcaagagcacaaggaggcttggatccacagccgcagtttgggcggctacagtggcatccagggagctcccgcccactcagaagggatggggctcccacccgctccatggagtgtgcagccccagcagtgcctccctgctacagccagtgtgatggcatcaactactgccatcactaccaccttcctccctccaatctcttggcaaccatggatcttccttgatagttgctttcagagccttctgtgttgtaagtgtgtatcaatgggtcattccttttattgctgagcagtattcctttgggtggtggtactacagtttatctatccgctcacctattaatggacatttgtgttatttccagctgtttaattgaccacttaatctttcacagaagaatatatatatgcgcctataaattttgtcatatgcaaaatgttaaataggaaataatccctgttagtattgtaatcagtgcctgggacaggacgtgcataggtattcagtaagtaggtgttaaaggaacttagacatgttttggcaaaatctgcaatctaattaggaaaacaaagcaagcacacctaagaaattaaagtgcacagagcagttgacctgaatggaaatcagtaatataakaatatccatcttctacccaaaggtcatgacacccccccaacctcgccatcagcacttacttggaagtctcccttctttcagttcaaggcatcctaaattaaatmaytcatctttcactgaaaacagtccctccactttcttcctgttttgttcaaatcttttcctaactactgagttcaaaacctgaattatttttgtaatgtccctctgttcacatttgattagtttccaagttctggttattctgcttcctaaatgcccccactttgttgccgctatgactgctttagtttagctctaactatctcttagctcagcacttagtcatctatcttgcctccttgactggctttcccctctctaattcagcctccacatggtcatcacacacttttctgaagtgtaattttgaccatgctgctttgttgcttctacctctccatttgctcctcattgcctgtaggctaaaattcagacttcrtgggatagcactgaagatgctctatgcttttcacgctttctccctgacctctatcatgcagaaatatttaactgcttgcaggaacgtgaacacacgatgccgtttcccatctccatgccattgaataaacctgtccatccatcttctggaatgtttcgccaactttgaccaggagaaaactcagaactcagatttgaagccttcttttatctcctgcatacatgtacatttacagaaaactcagtaaagttaaccactcctcatctatgccaagtgtctacaacactgcccttgcactgttgccagatcttccatgctagactgtgaccacagcaagtggctttttacctttgaatctagtaacaagtacaagagcagttacctaataggtactcggcaaatattttgggtgctgaataaatatgagtaactcaaattatggtgctcaataaatacgaataaatgaacatgtgactgaaataatctgatcatcaagttgtaatatcccagccaacatatgcctcttgtattttacttgttttcacttgtcaccaccaccttagtcaaaaaccatttaactttcttcctgaattgttgaatcagcttgctaacctatgtcagtaaattatccctcttttctaaactatagtaacacagattagctagactaatcttgcaaagactgctttaattatgttatttccccattagattccactgcctggctttcaaaagctctagctactctaataatcagacttttttctattgtataacacagtctccatttcagctaacccattcttcccacttgyccataacaagctctgttccttccagcttgtgtgccggtgctcacatttatccttttgcctgaatacccttgtcctctcttcccatctgtctgaattctrctgactatttatgccttgctaaagttggcacctgcatcatatctcctttctatctatatctatatctatctatttatatcacatctccttggaacttctgaactatagcaatttgctattcaaagcraatagaagttacaatgtacatattttctctctatatatcggaatctatattttcccccctaccctatactagaatataagctccacaaaggcagagaatttttgtctgtattgtctgtaaaggaaagccaagggctgagacacacaatatttcttaaataagtgaatgaaagtatgaaattaacagttgcatggtgctggttcaaataatcctcatttcctcggaagaaaagcactttgaagaaagtatgaacaaatttgaatttctgaattttaaagtatgtgatactttagaggcaatttcttgagtggaatyacaaaaccatattcacttatctaaaatgtagcattaaagttctgaattttagaaccacttctgaacgtcatgatttctgtacaagatagtgtcaattagtcaatcatgttatctggaatttttatgcattagtataaattgaaattaactcaacatagttctattacagaagtggataaatggagcatgaaatgatatgagaacattctactcaaagtaaaaaagtagattcaggttcttggatccagattaatgtgatgatatctgtattttgacaggggtaaggccattttgcaagtctttcctaaattccatgattgttaaaaggaaaaaattaaagctcactctattgaagtccttagctcaaaatttgacaygtactagatatgtgttaaatagttgaatggaagccattggagaaccattttttttaagaggagggggacttcagaagggcagtgacatagttccagttgaatttgagaaaaaaattagggtaattgtctagagaatgatatagagagaagacagaagatagtaaaaccaggaagttctttgttcattcatcaaggttcagttataaagcacctactacttggtatatacctagggctgagtgaataactaagattctgttataagtatagcctgctggaaaaaatttagatgaacaattatgatgacaaaatttaagagtgattagagggaaaggagtgaacactttggaatctattctgctagaaatgctgattgtacttggtgaacggtgtaaaaattgagggtttgaagacacactccagtgttctgatttgagagaccaatttaataatatagttagagataagagtatgagaaagtatgaaaggaatgatgatggggttggttgtggacatatgaagttagaagagtctatagaaaatccctgtggagataaccagtatagaattataggtaagttctggtgctcagagagatatgagggctgaggagggatgaatttggaattaatcaacaaaaaatagttgttgaaaacataaatccatgtggaatttccccagaagggtgcttacctcattgagatgaaataagggctgaggctgcagataaggacagcagaatgttaagaggacaagaatgacactcaaagacagcacatcatggctagacgtgacgtcaagaaaccaggaaagagtagttgtatcacttaaaatggtttcaactacaagtaatagagaacctgacccacccacttttaaacaatactgtaatttatctgctctcataactggaattccagaggtagactggcctcaagagtggttgatccaggagctcaataacttcatcaagaaaccagtttcctttgtctccttttgcactgccatccacggctgtgaatttgtcctacatctgtttctcctctggggatagaatgactggtaatacaagtcagactacatgctccctcctttatattcagcggaagaggcagtttgaataggaacctctcctagaagaatgaagaggaacttacccccaagtctccagcaaagtgctccttctgtcccattggcacaaatttggtaaactaattattcccaaaacaattattaatttagattaagaattaggcctccatcttctggggctgagggtagatttagcttcctttttttttttttttttttttttttttttttttttgtgaaatggagtctcactctgttgcccaggctggagggctgtggcatgatctcggctcactgcaacctctacctcccaggttcaagcgattctcctgccacagcctcccgagtagctgggattacaggtgtgcgccaccacacccgactaatttttgtatttttagtagagacggggtttcaccatgtcagtcaggctggtctctaactcctgacctcatgatccacctgcctcagcctcccaaagtgctgggattataggcatgagccactgcacctgtccagatttagcttcttttgaggcaccagcctttgctggtgagaggtgaatacctgaataaaaattaagattctgttaggtaaaaggaagtgagacagttaatgcatrksagacaacaaggagcactacagaagcattagtaagcttaggagggagaaaggttgaggagaagttattaacattgtcatataccaaatgggtcaagggaagaattaaggagaggcggaaaaatgcccatgagagcagtaattagaatgtgaccccagagacacaccatggattctaattaaagtggatagagggtgactgtgaggggaaaagtagttatgaggaattgagtctagtttcaagattctgagttttgaaagaaacgataaagataatagctagaggggggaaataatgagaatcaggggtttcttttttgttttgttttcatgatcatcaattaaatgtttcaaagttagtcagtgatttctaactgggctctgatgaaggggctttgagtgaccagttgtatgaacttagtcaacttgtcaagtctctttgacttctcatccattgaaagggaaaaaaagaaagctgtttttatcctatggagttggtggatttcagaaatatttttcttcagttttcttttattttatttataatttcaacttttagaatcacaagttacatgtgcaggtttgttatatgagtagattgtgtgatgctgaggtttagggtgtgaatgatcccatcacccagattgtgaacacagcacccaacagttagttttcaacccttgcccctccctccttcccacctcgattagtccctagtgtctattgttcccatctttatgtccatgagtactcaatgtttagctcccacttgtaagtgagaacatgcggtatttggttttctgttcctgcagtaaattcacttaggataatgacctccagctggtacatacataccatggaatactatgcagccaaaacataatggaatcatgtccttttcagaaatattttaaagaagagaatattgtttatattttaggtgtgtgtgtttaggagatattttaaatgttatactccatcaagtcttcaatacatttgggggaaacagaaaataaactaattttactttctacctcattgtttggtcttaggctaaaatccatgttttacggagaattcaagaaatttttaaacttcaggtagaactgtgttttttacaaatgtatagaaagcatagtgcctaatgcatggtagaaactcattaaatgattattaaattgttctacttttcatatttaaggatgaaaaatattagagattctccatcaatcagattataaaattctttatactggagaaatttcttataccatattttttatttgtcagagaattgattctaaaaaacaataaaactatgccacaaaaaaaactagtaatattgagtagtgcagcaaaacctgggtaactaagtctaactaggtaggttaattgaagttactggaaaatttattcatacattcaacaagtgttcattgagcacttattatgtgacaggccttgtgctaggcttcttgctctcatagagtatacattctagagggagagccaattaaataaattaatatacaatatgtcagggagataattgccttgaagaagaataaaatgagataatgggatagtaggcaattagtacaaatgttttcattttgtatgaggagagcaggaagggaatctctgaacaggggatgtttgagctgagacacaggacatgaagaatggctgggagaactgtgttcctgggaaaggggaaatcaagtgcagaggtcctcacctgggaacacattgggtgtgtttgacaaacagcaggttagactggggagatgggatgtagggaattggggctctgtgagtgaggggaatcacctaggagatgaggtcaagaaatggggcatcagtgtgccatataaggaagcaaggccttagagactgtgggaggaatttgggaactactctaagagacatgagaaggcattagagggtttagagcagaggactgattgcattgagctggttatcactctaactgccttggggagaataggctgttctagggcaagtgtggcttggggagataaagttcaaacaaatgtaactttttgtttccttgaaatatttaataaagtaaagctacctattcagggagtttgtgcaagtaatagcactgtcagatctactacaataaataggtgataatggtttgtaattagcaaagtaactattcatatagaaatcattcagttgatgctagttgactaatcactcctcatgcaatcttactcttgtatttgatgaactttgttttgaagccagtgcaatatgaagtgcaccatccctcctcagcagggacaaattaccagattattgagatcagtctccttaaaattaatgttattataacattctgttgtaaagaaagaattatatggcaggtatttttgtcaagcttttaggaactgttggagtgctttaaatttataacattgtgtgttccccttaaatgttcatggttggaacacatctaattttatgcaatatttaaaaacttttttggcagtgagattcatagggcagaagttacagaatgatttcattttggaaaataagtgaaaagtaaagataacacatgagcccaataaaatagtccattttcttgattttttttttttttgccaatatctttttcatgagggcagaccatggtgcattattccacccccgcccccagcatttgcaaaccaccagtcatttccttagggaccttaacaaacggaagcattgaattctcttcagtcagtggtgcctcccacctgggaaaaagacagctctgtaattgaatcccagcatatgcattgtcatccctcctgcctgctctcctggtgctacagcaaattaaaagatctccaagggtcagcctgcctcccagctgccagccccagtagacatgagggagccagcaaggaccaggtggagcagttttgagttgcactaaacacacggcgcaaggagattggccataacttcccaattgaatatttatgccagccacatttctcatcttgctctttggcactgaacacagggctgagctcctgctgatttcagggcgctgcattgtgtttggatcagctttgtgaagtattacaccagatgagaaatgggcccaagttcctatcactaagacggctggttgactttttttttttttttcatggagactatcatgttatagtatcaaaagctggggcagtgagggagttccctgacatctcctgacactgctgttacatgaatcgtacacaacttcaaccattgcttgctatggagtggaactttaatggctcctattcagggacagacaaatatactctgatttgtatattactgcatgttygtctttttttttcaaggttttatttttgtttgctaaggtcagggacttatcacagggccctctcatcacrtttcacattctgatccctcgtggcaggtgctaacttccttgctctcaaactgaatgggttgagtaacctcataaagatacagaatgtcttggcagagaaaggaaaagactacagaatgcctgtctatggaagagtctcagtgttatttagttattagttagccctgtaaacccgagaagatatttggaaacccatctacacacacccattaactttttytaggtggtggatcacagacttaaattcatgttcctgattcctaatccatattgttatctaataaaagcacattccttatgtagattttatcatgaaatttgcttaaaaaaatcattctcttcaattgtatttttgtatagcataataaactatagatcagtgaaccactgaacttcttgtgaattgctggttctaaaatgaaattctcaaatgattaaatttaaataattaggaggcagtgataatgagaagccaatataagttctgtaggcaaaagacatgccagagtaacctcatagtcttttgtgacagcagtaccagaaaggaagagcaaagacatgcattacacttagaacacatagaattcagccaagcgcatgccagaggctcggatatttatgagaaaaagacagaaattagctcaataactattcccgatgaactgatataaatctggaggtatacctctagtaccctctttaagacctgtccttggcattgtgcttttcaacatgactacaggcatgcgccaccacgcccagctaatttttgtatttttagtagagagggggtttcaccatgttggccaggatggtctccatctcttgacctcatgatccacccaccttggcctcccaaaatgctgggattacaggcgtgagccactgtggctggccaacatgtttattgtgagggcattgagggcatgctaagaaagtttgtaggtgagataggaacttcactgggaaagaggacattgaacagcagaatcagaatctaacagacaggctgaaacaatggactcaagtccaacaagatggcatttaggagaaacacatgaaaagctgttcactcgggtcccaaatgccaactgcatgtgtagtgagcgactgggaggacacagggctctcaagcatcacatgggacaaagacttgagaatttcactggctgggtttaggcatgaattaggactgcacagwgtctgaggacaaagctaatgtactcttcagtctacactgacaagtgagagttgtaatagccttgccatattttggaccacaactgtgtgactatggggaccactgttaaagmagaatcctggagatcttatggaagagaatgctaggaaagtaaaagagtttgagatggactgagtggactgagggaattggagatgccctccctgagagagaaaaagctcttgggcaggacaggtcattgatgtgtgaaagactgttatatgaaagaaggtttagacttgacccatgacaataaatgaattttcttggaccaaagtttcagggaagccccggatagaaaactttctgatagtataagttatctgaaaatgaaagggctgcctcttaagaaaatgattttcttgacactacaagttttcaaatagacaaaccaggctgttttattgtctgtgttgtagaagtgattgtagtaataaaatttatgaaggatgcactgtagrccaacctttggatacttttttttgtgygatcttatttaattcacacattagccttccagaggatattattatctccaatattgagactaaggtcccatgactggtaaatgaggcagagtttaaaattcaggttttagttgacagtagagactcttaacactgctctcatagccttaagcacaatattccattttgcttttgaggacatttaatgtcccttcagaactggaaatctgatcattttaataggttaccaccttttttttgtacattatatcaatgctttgctcttgttagtacaacattgggaaacctagatttgtttatcctgtgaacagtttgatctttactggtagagttttttcttagaaaaaaacagtgatatgtttcttagtacaattgatggcattaaatgttttgattgtggtcttatggctttactccactacttgctagaggaaaataattttctgcttcattaatgatggtttgaactgatctgacagaaagtgaatcctgtgccattcaaataatgcttggaaaatccattggatttttgtttatttctttgttttccgattaagggggacttttaaaaacaaaaatttagggaaatgcttctggttttcggaaacatttattcacatttcttggggttggagagaactgacatgttttaaatttgttagagtcatagtgaacaaaggggaagagttgcaggtctcaagtctagagctgtaggccctggaaaggaaaaattgcaaaagtgtccagagaacagtgtgttcatggctttatttgctgttagtccgaggcctgaggtcaccctggcagatgggtcacttgcactgcaagcactcatgctggcctcagggacagggatgaggtcactggcacatttcaaraacagcttcctttctttatgcatacaccactttcctggtccttgttaagggtctccttcctcttgcggttcccatctctgcagctgaccccagttctgactgtgtctggggaaatgggttggtgagggcctccttctgggactatctgtccacctgatcagtgatatagacactgtgccgcggagaggagccacatctcccagcsagcctgccagcagagtaattggctcagggttacaagttgtgacaagtggtttttggatcctaatctgaaatatgtcggtttaacatgacctggcattgttacctgatgtttttaaatgcccgtactttttccagaaagtgggaactgatacacagcagtggcatgtcctactaattttcataagatctaaattgatcaggatgctttattactttttttattccacagtatatttttcctctttgactctaaagtgcatgtgcacgcgtgtacacacacacacacagacacaaacatgtgtgcacacacacacaccccccctcactcatttgggagatctaacactgcacatataaatattgaaacttccaggctgggcgcggtggctcacacctgtaatccaagcactttgggaggctgaggcagttggatcaggaggtcaggagttcgagaccagcctggccaacatggtgaaaccccgtctccactaaaaatacaaaaattagccaggcgtggtggcacgtgcctataatcccagctactcaggaagytgaggcaggagaattgcttgaactcggaaggcggaggttgcagtgagccaagatcgtgccgttgcactccagctctgggcgacagagcaagactccgtcttgaggaaaaaaaaaaaaaaagaaatttccacatgcatttccatcagagaactaattccatctccccttacctagccccttgctctcctgcctagcctgtgggaatctttgaagattctttgtattctaagaactgtcccaagaacaaagtagatgctcaagcaatgtttgctgaactagactacatttgaktccatgtaaccaaatgactttatctacatttttttctattccttttattcattagcacccactaaatatactccactattctaggaatagggaaaaaaattcatgaacaaattagaaaacaatcctaccctgatggtgccttacagtcttaattacgtgaatagaagctattgttgttattcttacttttcaggtaaggagaattgaggcttttgtcacataggaagaaaaaattatgagcaastcttgcccttaaaatcattctgatggtcaaatgcaaatttgctattttggtggactcttgagaatgtgggaaatagacccatgtccactttatgcaaagagaaaaagctggcatgagtgggagtgtttgaacatcaagaatgcttttgcatttcttgggttgtgaacaactgatggagtcaacttataaataagcaggatcatgactcattaccaggatctgtacagaataaataatggcttcagagttcgagtagactctaaactacacagttttaaggcttcccctttcttgggtttgaagaggatatttcaaattattagaaagaaattccatctatgctacagaaaaattgcaggaaaaaaaaatccccagaaactagttgcatgtctttacatttttctttcttttccttttttaagtttttgtgtttatgactaagttcattttttatattgtctggaaagatgctaatattcaaatggcctcatgacataaggaccactaacaaggggttgaaataaacatcctggaaagaaagaatgactacctttaaatattatgagcagtgtacatttggcagagcagatccttatattgactttagtaacctgaaaactattcaaaatgttttatttcagggatatgcattcctgattgtgatttcatggtgtgaataaaataaagtcacttaaattgatagaaacagtctgagctctggcatcagataaacatgagttcaagttctggtgctgctactttctatctgtgtaaccttgggactgctgtgtatcctctctgagcctcaatttcttcatctgtaaaatgtggaaaattatatattaatacgttattttaaagattaaaggtgataatatatatatgaaaaaccaaacacagaatgtgtcatactgtaatagtccattttcatactgctgtaaagaactgcccaagactgggtaatttatagaggaaagaggcttagttgacttacagttccgcatggctggggaggcttcaggaaacttataattatggcaaaaggtgaccgggaagcaaggcaccttcttcccaaggtagcagggaggagaatgaacacaggaggaactaccaaacacttatgacaccatcagatcttgtgagaactcactcactatcttgagaatagcatgggggagaccgcccctatgacttgattacctccaccttgtctctcccttgacatgtggggattatgaggattacagggattacaattcaagatgagatttgggtggggacacaaagcctaaaccatatcacatacaatatatacacagtaaaaactgatacccattaatcatttcctgttgcttaaacctaaggtaaaatttatagattttacattctgtataaattggaattaaaaagaaaatgaagtgtcacaattaaattaatcacaaaacatataaaaggaaatacaggaatatttttgctgtattcttagtagccatagtgtatctctgttctctgaagacttttagttgcaagaaacattgacctacctaaatgaattcaagcataagtaactaaattgtaaatatctagataattgcatttcggtttcctgtggactggaatgtagaatgccaaggctatttttattttgaggtttttgtttttcaggggtaacattttctgtttcttctctgctcckttctatggtgtgtgcttcatccttttattcctgaccggtgttccttctttactcatcttgtatgtcgtccagattggctatgagcccctacactactttgtggcttcagtgatatcattaagcagatacctcccccaggatcccttattcgaattcatcaaaacccagctaagaatttctgatgacattttctagaatctttaagtttacattaatttctatctgttccactttatggacgcttactgtactttaattttctattcacaggacgctgctttgtcatttagatggtaaactccttgagggtagggccatgttttcttcactcagcaatcctaacacctgtgacagtgctttacatgtagtaagcaaccattaatttgtttgatcatttaaattaaaagtcttggccgggtgcggtggctcacgcctgtaatcccagcactttgggaggccgaggtgggtggatcacaaggtcaggagatcgagatcatcctggctaacacagtgaaatcccgtctctactaaaaatacaaaaaattagccgggcgtggtggcagccacctgtagtcccagctactcgggaggctgaggcaggagaatggtgtgaacccaggagacagagcttgcagtgagccaagatggcaccactgcactactgtactccagcctgggtgacaaagcgagactccgtctcaaaaaaaaaaaaaaaaaaaaaaaaagtctttgggttgggcgagtctagtagaagataatgactttacgagcatttagcattgactgtaattaagtctgttatcgggatgtgctacagatactacttggtactgtttttgagctcatctttgttcttggatttcacatctctttttcttctgtttgttccatgattggcaaatcttctgattcctgactgccatttaaactcatttatcccagtttttcacacttaaattcaccttgtcacactcacatgcttgatttcacagctgtttctaagatggttatggcttacacaccatttcactcattcatttattactgaaatgtttcttgagaaactgcttttcttgagaaactactttttcaggcagctttgcaggcaataaggatatagcagtgattcactggaatgaaataatacaaattaaaatcagcaaaggaaaaaggcatatggggcagagttcaggagaaaccggagtttatttccagttgtcttctgtccagagttgtacaaatagcacttatttgtccctacaacaatgtgcgacagtacatgcagagcgttgccaatggtggatgctcatccaagccttagtgcccaggggtcactattattggaggtcagttatataaacatgtctgaccacccatgtggctgaccttcattactgtttttagccccttcataagtcagactgattctgcgtggctcaaagcccccaccaggaatcacattgttagcatcattgttagcaaagagtatctggtgtggcccaaggctccagctaaacacaggtactctaataagttaagatattccaagggcttaaaggttatctcccaggaattggtcaagggacagacctttcttttgaatgtgcagggtttggacgatacactttttactgcacaagggctaacctcacttattttctttcttctctcaaggaccaagccctgcgccatctaaacaattgtttccaacgttgtttcctcagttttagttttatagtggcaatattaggtcccagttactctatcatagacaggaattatagtcaagtaatttgaacaactctttataaaatgttatttcattcttattacttcctttctatgcttttgaatatattctataatgtgcctatataaaaatgtacataattaattagcacatataaatgacacctaaataaatatgtacacatatttgaggtgcttactttttttattcaattaacaatctagtagtttggaagctactgagtttgacagctgtttatttgcatctttaataggaagggcacttcaggagttaacaaagataaatgaaaaagaatcttgttatcacagacatcctgtggcagcttcttttttttcatttgttttctagaagaacgtgtacacaaatgacaataagttaagacagagtgtgaaaagtgctgcasaggaaggtaaaaataatataacaaaaatatgayagtatgaccaggtcacttctggttttgaggaccagaaaaagctgtttggagaaagtagcatttctgaggtatttaaacattgattaagatggttttcaggagctatcagacaagaaagatgctgtacaagctaaaattgtgaaggggaaattgtgacaatagtacaataatcatttctgatacaagaaactgtatactaggtgattacttgaagataaagctgaatggagagttgtgaatgtctgggtaaggcattgggacaggatagtactgattatatttgtaaagagaagacatataataagagctaagtttggatttctcagaaatcacatataactttatttttgttcccctctatgcatttcttatgattggctttaataaagcattctgttattttcagaatttgactgatgtgtttagctgtggtttttctttttcctatttgatgtttgtggtgctgtaaggctctggggttgatgtttttcatcagatttgggaaaattttgaccattacttattccaatattattctgtatcattctctttctcctgtttttttgataatattacacaggttacttatactcaattaagtttccactcccacttttttcctctgtgcttcagtttggataatttgcattggcccagcttcagatatcctggtcctttcttttgcaatgtccaatatgctgttaagtccactcaaataatacttaygtaatatattgttattttcattctagaaattttatttagttcttttttaagagtttccatttcttctccctatgcaatatagagatacatactgttataaataaagcttcaatgctgcaaaagaaatggcactcgaatataaaattttctttttaattctcagcaaggcaacatacttctatagaagggtgcgcacttacagatagagcaatggtgagtgcacacctggacaacagagggaaaggggttcttacccctgaggcacatagcccctgctgccgtgtctttcccctattggctatggtgagatggctaaactaattctgattggctaatttaaagagagtgacagggtgagtggtctggtggaaaaaaatggttatccagggtggagaatgagtcagggcggagcaggtagtaggtaattggaatgagttgggatgaagcaggtaatcagaatgagccagggtgaagcaggtaattggaatgagtcagggtggagcaggtaatcagaatgagtcagggtggaacaggtaattgaaaagggttgctttatgaggaagttaagtttaaargtagaaggcaaagaatcaatactgacatattgattctttgaaaagaaatttagaactcatatctaacaatacatatatttttatatatatgttatatacatatatgtattgatcyatatatgacagatgtatatatggcagatatgtatatattaatacctatatatggcatataaatatttatataccttttgtgtgtatcttttcctataagttacttaatatattcacattagttttaaaatccttatctgctagtttcaacacttgggtcataaacaggtctgcttttatttactgtgttttctgtccactaggagtcatatttttctgctttttgttaggtcacaaaatatttataatgttctgaayattatatacaataaatcaatagcgattgaagcatagtatttcttttgtgttttatttccccaaaaagtggtagttctttcctctggcagttaaggtgaggatctgttcactgagacccttcctagagttgagcttaactggagctagactatgattagcmcaacttccatccctctgaaaaatcactgcttttatatttcaacatttgaactggagaggcattgactgaagttataattttttagggttttttttagttaatatttttatttagtactggcaaggtccttatacatgtaactttggtaaattcactcattagttctagtagtttgggggtttggggtatgaatttcccagaattttctctataaacaattaaatcatttgtgaattaaagttttttctttctaaactttgcttattttatttatctttgtcttgtactggctaagattgctagtagaatattgtggtgaagtaggaaaagcagatgtctttggcttgctaccgaaataattcattatttcatcaccgaatatgatataagctatagacttttcaagagtgcttttatcagacagaggaaaaatacttcttttcttagtttgccaagaatttgtatcatgaatggatgatgaatattgtcaaattttttttgcactcatggaaataatattatgttaatatattgaattacattgatttccacatgtgaaatcagctttacattactggcataaagygcacttggtcatgatttttttctattgctgggtttgatttgagaatattttgttaaatattttctcatctatgtttataagaaatatatatccatattttcttttcttaaaattgttcctttctggttttggggtcagggtaattctggtctcctaccatggaatgaaaagtgtttccttctattttttctgaaagaatttattaaaaaaattgttactaaaaaaaatttttttttaaataacagtagcaaaaaaagtttgctagtgtttattaattgaaccatatggccctggaggttttttgataaatatttaattataaattaagttttttaatcaatgcaggactatttagattttctatgttaattggatcaattttaataaatgtgtctttcaggaaattcactgattttgtgtgtctttgaattaattggcataatatagtttataatacttccttattaccctttcaaaatcattggtatctctcatgatcatcttttggatttgtaaattttctctattgttcacagattttgtttcaattatttctactctttattgtttccttctacttaccttttgtttaatttccttttcttcctctagtttcttaaagtggaaacttaggtcacagattttaaatccttcttcttttctaatataaccatttaaaggtataaacttctcattaatcactactttatttacataccacagtttgatttgatcttttcattatcattttgttctaaatatttattatatttacttgtgattttttttcctttggttcacaaattatttggaagtgtagtgtttaattttcaaatgttggggattttttatatgtcttattaccattgctttctaaattaattcattgtggtcagwtacyataccctgtgaaatttcaactttaaaatctatcaatatttactttatagcccacctatatcccaggtctgtcctcttgatagatgttccatgtgcacttgaaaatagtgtgcattttataattattgggtattagtgtcctggaactgtcaattaggtcacattggtgataacgctttccaamtcttacgtgtatattttttaaaatttatttttgtctacttttcttctgttggttactgtgaaaactgtgtcataaaagctccaactatgatcatagacttatctgtttcttcctttaattctgtcagtttttgcttcatgtattctgtatctctgcttgtaggcacatgttatgtcttcttgaataatttattgtttttcatcattttccaattcctttctttatatttgctgatagtcttcatcttgaggcctattttgtgtgatgtaatattagcttgaccatcttttttatgttaattatctgcgtggtatatcattttccattctttgaccctccacctatttgggccttatcacttttcaggttcccaggatgcagatgctgagatatttcctgcaggagtttatttgggttgtgctgtcagtattagttccttttgaggggcatgaaggaagcagggctggattcagagacgttgatctgtagcacagttgcagcaaaggtctcagctagtcttatgagaggccctagactatggtgacccttagggtaagagggaatagtcattttacccctccattgacctgtcagtagatgagggctgccctcagaaagagtgtgctcttgggcacagtgaccccgtttagttgasggcaagttttggaaaggaactcagtagaaagctaccagttggtaacactctcagcagctatgggaatgagttcttcaggatgtctgggcagcgtactaaagtagcacagtatgctgatatttaaagtgcttctctcatagatcccccgtaattaggtcttggttgtataatctaacctgaccatagtcagctttttattggagtgtttagtccattgatatttagtgtaatcgtcaatgtgtttgagttcgagtgtgccatcttgctttgtattttccatttttcacatatattctttgtttgcttccctttttttggcttcttggggttaattgaattctttaaaatgctgctttaatcgttctgttgggtttttgttatacctgatggtatttttcttaacatttaatgctagagattactccatgtaccctaaacttaacctcttatccaagtttaatataacacttcatgccaaatgaaagaaccttgaaaaatataatttcaccccactttttgctgttgttgtcacatattatataagtccctgtatacagtgcaattatttttgcttcartaggctgtctttcatgaattaagagaaaaataaaagataatcttttatatttacctatatatttacatttatgttattcttaattctttcctgtaggtctgagttttcctctggtatcttttctttgagctgaaggtcttcctttagtatttgttatagttcaggttgttggtgagaaattctctcaacttttattgatctttatgtttctttcttccatgaaagcatgtgtagcttctttgggctactgcacagttctttttcctagtttcctttcctttttcttttttttttttttcttttgaaacagagtctcgctctgtcgctccggctggagtgcagtggcgcaatctccactcactgcaagctccgcatcccaggttcacaccactctcctgcctcagcctccggagtagctgggactacaggcgcccgccaccaagcccggctgattttttttgtatttgtagtagagacggggtttcaccgtgttagccaggatggtctcgatctcctgacctcgtgatccactcgcctcggcctcccgaagtgctgggattacaggcgtgagccaccgcgcccggcctctagtttccttttcaaaagatggtcagcccttcaagaatcccaattttattttatcccagttgtagcacaatctctggagcaaacttaagtcaaagtcctattcctgaatgcatactaaaagtgttacaaaaccagctgtcaggacttgggctcattttttgactccctgggtcaacaaggtcagctggaagcttctgcttgatttggagttcacactttatttctagctactgatttcttccatattggtggcaggggatgccaaatttaggtaattaaacattttcagctctctagtgtgtagctaaggtgatcagtttaggagggtgggtatgcatatcagcttaaattgccaagatgacagaatctgcattttttcttacagtattatatggaatagtcataggattattttttgttatttttatatgtcagtgataacatgtttatttttgtgttagtaataacatgttttccatattatgttataatatgttataataacgtgttatsttattacaaaccggttatgaggcttaacttactagggaagcttttcttatttatttatgcatttgtttgtatgtttgtttctcatgaactggcatgttcatctggttgactaagtcttagatactggttttaattattactgtgagatcacgtggtcaatagaataatatttgtaatctattaaaaaataactgctgcaatttcaacttttctctgctgcttactgctctaccaggtctatggaaatgcaggacytagcaagycctcatactcttgttggaggtggtgatactccaggtagctccaaactggaaaaatctaatctcagcagcacatcagttactacaaatgggacaggaggtaagtgtactaccctgaagatacccagaatcatatttcaatgtttgctttaattttacttcttagagatctgctaataaataaatatcttattatcaataacacaaatcagcattatatccaaggtatatataattaatattgattgttttgatgattttcttgaaatttttgctcctcctgtatagctgggaacattcacagagaatagatagcattgagcaacatttcaagggccttgaacaaggctttctttttgtatttgcccttgtaaatattccacaaactttagaaattgaggtcaaaggatttccaccctggtattagcaaaaatgtctgtatgtgtgtgtgtacacacttactactttttggttttattttgaattataaacatttttcttaaaaatgtttcttcttaaaagtgcttttttaaaaaaacacatggttttggaaatacaaaaatactcatatctgctgcattttcttttcaaagagaataacacttaacatttatttaaaaaggaattgcatttttttcagataatttctcattctattagcccataattacgccacagcatgacaacaataatagctattacttcagatattctgctttattatttttataaaatgtattcaacttgtcagaaaatatggtccaatttttatatcagaatgtgtgtttrtagagattatgtatacacttatatatagactgtattttaaattattcacaatttgaaattttgtagatccatctagccaataaatttagaattatatgacatttaatttagatattagcatttgccacatcatattttcttttaaattttaaataaatatctgtgaaattgatacacctcttcccatttattttagaataacgatgcaatctaaagttttctctgtaaggttgtgtgcattgcaacttacctgtatttaataatgttttacaccagttcccttgtagattaacattttccttgtttatgatgtttatttgtctctaaacatgcatctgtaatttcagctaattaattatgcaattgcaaatgtatagaatatttagtgatgaaaactagagtaaggtacatttaaaccttaaattgggtacaaataataaaatttaaaaactcaagcactctaggaacagactggtgaagttcactaatcatcatatgtatatatttgactgaactaaaacagacctgataaactaaartgttgaagtcatacagtgcagttataattttggctaaaaggtcagaaaccagtgcaagcattgaagattattcatatccactcagcaggcattcagacaatgaacttttatactgttcctgttctcaggggaaaacatgactgttttaaacacagcagactggttgctgagttgcaacaccccctcttctgcaacaagtatgagagatgctggtacactgcatgtgtttgggtgtgtggatttgcccctctggattgctgtctgttgctatgtctatgtttgcatctcttttctgtgttcagtacttaaaaaggaaaaatgaacatgccttttagttgtttattgacagcagttggttatgatttcttatcaatctgtattcttagatttttttaggtcagtagtattagtattcttttcttaaatttttcataatttcacctaaatgatgcatatattggttttctaactatttatcagtttattacatgattaattttgcccaacaactgccatgtcaaacagcaattgaagcagaatggccacgcatgcaaacttaatcaccttcataacccacagactttcataatttaaattaaattcttaattaaggaaagatatttgctactctacagactttgagaaatattccaaagtatataaggtaacattaataatcaatatcccctcaccttaaaaattatcagtaatgaaagctatacatttaaaactagaaattaatattggcttttaaatttttttgaactatggatattaactgcattcatacctacacacatataaacaaactttctcctaaatcaaattctaatatcctaaaaaaaatcaattagaacaaagccatcacatttttgtggcaccacccagttgtagaatcaaaaaggagctcatgcctattggaaatgtgcatcacaaacaagcagttagaataggcacagtttgcctggaccttgctctatctctgatgaaattagaatatatgatcagtgaagaaaaactacttcaatatgctcattatttgtatttgtatagttttagttttaatgtttttcaattttatacttaaatatacttttcatacttaaaattatgttgctagaatttagatactcttaattctatagcagggtctttttctctaaagggccagatagtaagtatttttggctttgtaggccacatgtctgtgtttcagctgctcagctctgccatcatagtgcaaaagcaacatagaaaatatgtaaatgaataagcatggctatggtccaataaaacttcatgggccctaaaatttaaatttcatataattttcatgtgtcatgaaatattgtaattttgacaactttttaaacatttaatatgtaaaaaaatgttcttagcttactggctgtggtctgttctcaaatagtgtttaacacaagcaacattataatagtgaatatgtgcaataaatagtaatttacctctgatctcaaccagaaacatttttctaagtggtaagcatcaggctttcctggttcttaatgtcagtgttaaaactcgtgagtccatgggagaagaacaaggagttgtgcgtcagggccactgtggatctggatcttagcactacacatactggctgtgtcaccttgaacaagttacttaagctctctgagcttcaattcctttctataaaaggatgataataatacttcttggcaagacttttgtcttagataatgtatataaattgcttaacaataaatatcagtatgtcttcctttctttaattagtaatgcaataataggcaacagctttttaaggaaaatgaaaatatgcattgtgttaacagactccatttggtcagataaatttagttgcatttagaaatgtgtaaactgggctaaagaaagcaaacttttggtaacaaaatgttagataaactttgattattaataatgtagtcctggtagcatattatatgaaacttttaatgaatttcaatgacttttttttttttgaaacggagtcttgctctgtcacccaggctggagtgcagtggcgcgatctccgctcactgcaagctccgcctcccgggttcatgccattctcctgcctcagcctccygagtagctgggactacaggcacccgccacgacacccagctaattttttgtatttttagtagagatggggtttcaccgtgttagccagggcggtctcgatctcctgacttcgtgatcggcccgcctcagcctcccgaagtgctgggattacaggcctgagscaccgtgcccggccaaatttcaatgactttttatggtgggtgttggtgacacagactaagcatttgttgcatgatctcttctgttaagaataaactattttattttcaattcttggtttttattgttggaattgtatcacttcataaaattataacaaaacaaaaggcaaaagaaaagaactaatttaatagcttttcaagatcattccaataactcgagatgttcaaaaagattctttatttatttatttaagatggagtctcactctgtctaccaggctggagtgcagtggtgccatctcggctcaccgcaacttccacctcccaggttcaagtgattctcctgcctcagtctcctgagtagctgggactacagacacacgccaccacgcccatcaggctaatttttgtactttacttagtagaggctgggtttcacyacgttggccaggctggtcctgaactcctcacctcaggtgatctgactacctaggcctcccaaagtgtcgggattacaggcgtgggccactacacccagcctaattttttttaattgatataagtagatagtatcacctttagattttatcctactacattggtgctctttaagtatgttgcaatattcttgaaagtaatttaatgtgtttcactaccttaatcctaattatataattacatctgcagatttatatggaacatagattttcctttgaaattgttagcacttgtaaaattattaaagtgtaaaatatagagatrgcataaatgcaagcataccttagcaaataaagcagaggtcaggccttgtgggctgtctgctctctgttgtcgctatttagctctgctattgttgcacaaaagcagccatatacaatacctacacaaattaacgtgattgtatttaaataatttgacttatgaacactgaaatttgaatttcattaaaatgttcatgtcacaaaatattctccttttgatatttttcagccacttaaaaaggtaaaaaccattcttagcttaaaaccatacagaaacaggccatgggtcagatttggcccaactcctgatatagatctatatgtgtatacataagttatgttgtacatataagaatgcatgccaattatatgaaaatttacttccagatataggtaattccagattctaatttgctgaatggtgtcaggattcatgatgaactacacttcatatacaaaaatacttagatctattgggagggctagggcagtatctaaaagagtaaattttcactttctcacttaattgaaatgtatcaagttcctattatatgccaagttctatgccaggaaatgggaacccagtgacctaaagaacacaataccagccatccaggaaccaaaagtctagcagagggaggcagacatgaaaataatgaatgccataatatgttcaaggtggatgaacagtggagggagggaatatttgattctacatggagattaagaaacaacttcaaagaaaaggtttgggggaatagaaatcagacattctgatcagctttagtgtttttttctatatttgaaatcgatatagaaaagaatcttctagaatttttactgtagagatgattgactcacatataatgaattagtatttgtgcaatagagctacctactgctgtgggtcagctcttttgtagatttttttttagaataaaagtcataaatggcttcatcaaattattttacaaaattaaatactttatgggtagttaggaatgaaagacacttggtaatcataggtttttgaatgaatatattgatccaaacaagcataaatcataggctatactgattattaaaaccagtaggcaatacttttactgcttccctgcagtgttataaattgtaactttcctgatctaactctttctgaaattctttgtagaaactaagctgtcaaaagcctctatatgtgatttttgtggttcagaaagaagtgtatgtggaattacatatatgtagttttttaaatggacaccttaaactggtgcacacacaccttaatctatgtttaaactacactgatttatgaagatgaaatgtaaatgtaaattatgtgggttacctttcgaggatgaagcctgaattgcaayatatgaatatgaactttgagttatgataataaaacagactttctctaaaagtaattaatcgacattaatgttatacttaacttctaaagacaatttaaggggacaagagtaagactgctttaaaaataagtgtatggcagtagggatgaaggttgggatgtgaagacaggaaatctgtgatttagtagccattactggtacctgacaataattatgtatgaccttgatttagtctatagataagaattatttttaaagctaaaaaaatggaaaagccaatcatgtatgtttatttatttttaccatttgactctatcagaaacatccaaattgcaagtagctaactagtggggagggggacctgacagtacaaggatttcttaacggttctcgacaaagtggtatagaaagtaattttatgccacttttagcaaaacgagctctgactcacttactttgaagatacagaataataatcccacaaaactcttcaacctaggacattaaaatattgtttcttttgaaatcaaaacatttggtgtgtaagcttgcatttggttgagaaatacggtgcttgtcttctataaaaggattttgcttccattttattgcatgtaatgattttggtttgctgtcctgaaaattaaaagccccatttaaacttcatgttaatttaagaaagacaaaatatagcttaacatacatttgaacagtcaaggaataggcactgataattatttggaataaggatttttacaagttagtagtaataagactagatttgtcttactaatgaacatttttccaatagtgtcttgcatatatttaatgaaagtttcctgccactagaaaagtatatagtaggtgtaatttaaagtgcagaaacaaaagcaagataaaagaaaaaagaatacatttcaaatatatttctagcttcagtgaaaataackttgttttccaagctttatctataattattatataatgtttactttatactagttaactgttatataaatatcaagataatacttcttcgtattctaacatgtcttaataaatcagctaataatataaggagtgtctattcacttctctatttgagctttctactgctgaaaaaatagttgtttattattacctaatattactgctttttatttagaaaaatcaaaccaaaataactttgggacttacttagagatcaagaggtgcttgttgatgctcacttagtatgaatgcagcttattttctgtgacagaataaatgttttatttctacttttccattttgttctacccttgcataggaaaaacaattttacattaacatgtaccacttcccctcaaatgttagcatccattactttaaaattcaggcattttagtaaagctaacacatcttgcttgttactcctctcttcatatactttcccagggatggcttttctcagtaaaatgaacttcctttgtctatctttgactaaaagcaaacctttaaaattttaatgagagatgtttccagtataatgaattagaccaaaaactcactctctccttcttctttctccttttgacctccccaaactttcaaattgaagagattataatcaaaatcaatactaagcttttgaaattgggtctcaaagttgaaattcaaagtaacaaaactaatcttcatgtctggcttctagaccagtttcgttagacacagctcacattctgccacctccattcgcaagtaaaatctatattacaattagtataataaagctacttttgcaaatattgttcgtagatatagatatgcataaataggaatttagctgcaagtagaagtcagaagctctgataaactgtttcttagttttgctgaaggctttgggccatgactttttgtcataaatgttagaactcaattgtaaacattgcgtgaaatggagtagccttgatacccatctagattatactctgcattatcttcatacagacaaaaggaattcttgattagctagtgctgcctgagaggcagtatggtttaagagtttggattctgaacacacactacttggtctcaaattctagctcttacaagctttgtgactggggacgttatttaacctttttgtgcctcagtttccttatctgaaaaataaagatgatgatattatctactgactgttgagaggagtaaatcagtaggtgtaaaggacaagagaagtgcctggaatgtatcaagttcattttaagggtgtgctgttactgttacctaatttcaaatttgctacttcttgatgtcttttaaaatatcccatgaggaagaaatgggaaacatgccttagtatcctattccagtattttgcagtttttattttcagtgaagtatttttaattattctatctaggagataattgcattctcatcatgctttgggcctttgagaagagacactgtcatgagcataagctattttcgtacctgaaggcagcctgatacggtggaaagatcctgcatactagagctaaaaacctgagttcaaatcttagctctaccgtctcctgcaytggaacttatgcaggcttttcagcccccctgaacttcagtttccttgtctataaaatggttatagtgatttgtattaattagagttgttttaaggattagctaaatgtacatcatctagcacgtagcaagctctcaataagtattagttttatagtagtaaatataaaggtgataaaatgattttataatgataggtttagttattgataaggtataaccataatagggattactgtgcaaattactactgaaaagtaataaccaccaattcattatttatcattatataaataattagactactcttcagatcattgttgctcttgaaagataagtcaaacttgagtttgcttttttgctaagaaaagtaatccaagtttctttactttctgtttccaacatttacatttctcctctgaatcttccagctgatcatgtcattaataaataatggatactaaattaacccagagctcactgaaggtctggttaattctgttcatgtggaaaagagcataatcattaccgcatggttttctatcaattaatttcttttctaacagaataacattactgacttgtgtgattggtgggtaccctatgactgactgttcttttttgtcctttggctagtcttcagctttcttctttataattttctgcttgcttctaagttatttaactgtatcattcatttcacttatgaccaggaaacacaagaggtgttaagtagaaaatagcttagtttatttccttgctgctatgatatatgtagtaaagccttgccaacaaagggaaaatatggtgtgaccaaatgggtaaaactttattctcacgccccatcacccttgttgcatctaataatgataataatgtgtactaggccactttgttaccaagcaaagattttgccaaaatacaccattaccacgtagaaataacatattaaaatgagttttcaaaaggtgtacttgytgctgtagaagtcatctctttttctacgcttatctctaaacatattaaaaattgttatgccattaaagtatgaagcccaacaccttatagctcgtgagtcttttttagagcttcattgagtgcttcatttttcattcattgtgtgaatgagcccatggtttctatacttttatatgtctccattgtattattatgcaaacttaaaaaatatcttcctgggaaaaataaaatataagctagtaaatttctttggtataattttaattaaatgtgctgaagactgatgatgattccttctttcctattgactatatgagagtgtgtttaggtgaattaaaaatacaaatatgtgtactgctgtttcactttttaaggctgactgcctttaaaagctggatttgagagaactagcttggccagaggattttagattaaatcctctaaatgcatgcccgtttagaagctaaattaacaaactctcttcatcaacttctcaggttttctcttgcatgcccatggtagctagaaatatcactagtagaacggacagagtctttgacataaatttagaagtaaaactcacatgtacttattcttctacgtagtgtctcttcttgcagtcaaaacagagcccttgaacagcagtgaaaccacagccacgactggagatggagcgcttgacacttttactgggtcaggtaaagcctttagctcgtgtgtccttacgtacacatgggggtgcatccacatcctcctcctcgggaataagcaacataagcatccaagctcttagaactttgatccttataaagttagaaacaaattcttattttttgagaactcatagtcatagcagtatgcattgttataaattatatttagaataatttcgcttgatattttagttgacagcaaaagtcccatgactttcttattatggataagtaaacttaacttccttcaaaattattttatacgatgtttaattaatttaataattaagttgtagtagctgaccttgcttcttcaacttacccatttgaattacataaaaactgccttctgtttaacattcgagatgtaaaactatccatttgattccttctaaataaccttgtttcctctctgggtttaaaaaactcctcctgtgtaagcagctgagtgacaagtattaaaggttaatgggctgcaggagagcacatgctggttgcattagaacccagcctctgagagcgctcgaatgcttcaaagagaacaatagcatgtctttaaacatcaatccctttaaaatataaatacctgataactcccagctgggcacaaagggcatgaattaagtagacttaattaaatttttttaagttacaatatttcttcggctttttatctggtgaaaggatttttctaacctgaggaggatcgggtacatcagaaagaagaacattaaacctaggaaagtatttgtggtaattgaatctcggttctgttattctactttaatacattttacatttatccatgtgctcatgttataaggatttttttgtcagtatgttttgtgtaaaaatagttgagatatgtcttagagtattatgtcattatagcatatatttgatttttacagatgatctaatttcactagttcacaccgattagaagcagttgccatatatttacataaatattagtactccaagaaagaaataatagtacataaactttgcacagagactcatatgtactaatccacatcttttctagcagtttacctgcctctcaggagatagttaccagttcagtattctgtattgcacacttacyatagcttttgtaaactttctgcaaaataaatctatatgaacaaattgttaaggaaaggaatggagttattaacttattgctgacctacttcagtagtatactacaagttaattgaaagctgaatgacaaaactataaagtgttagctccagaaggaatttcagagctctctgatccgttttgtagacaagagaagttaaaagtggttaaggccatacagtcaaggcctcacagctggtcagtggtataaacraatctaaaaccatgtccttatgatcagtccctgggtcctttctgtaatgccccatcagaaaatagatggaaaaagaaataggcatgaacaatcatcctgtctgaaattcactcatattgtctttgtagatattttcgcaaatttttaaagaagtatctagggacgtgctgtccagtaaggtagccaccagtcatatgtggttattaaaatttgataaaattaaaaattttgttttttattttcattttcacagcaatattgcagtaagtatatttttattaattgattttgaaaatcatcaagtacgactagaggcgttaagttctcaatattttcagcaaccaaaatttaactgaattttcaagtttaaacacatttcaagtgtttaacagctgcatgtggttagcagctaccatattggacagctcagatacagaacatttccaacactgtggaaagttttattccacagcagtgatccagggcagggattatcaacatcagcactgttaaagacttgggctaattctttagtgtgggaaagctatcctctgcactgtaagatgtttggctgcatctatcccagaatgccagcagcactcccccagatgcttctttactaaagaagcaaccaaagatgtcttactaaagacaaccaaaaatgtatccagactgtttaagtgtcccctggcaggcaaaattctcacccccacccacttctcatcccattgagagtcaccaatctaagatggcacgataatgagaatgaaaccttaaaattgctttgacaccatcagagaaactgacaatagatattaaacatgtatttaaattaattttcagggcattttgaaaacaagcagttttgcttactgttgtatgcagaaatgatggaatgtaatgagtgttttgggtaatgtttatgattaatcagatgacagtggggaataaaacgaaattctttcaagtttgtacaagatattccagaaaccattctggaaatgaggctgccctttgtgggagcagtctttactttgatctgcaaaatttccactcactttaatccaattttgttgttcttttcagttatctgcaaatttctgaattagaacaaaatgtatatattttagtaaagaagcataaactttcctacgtgaacatcgtagttttctgagccaaaggttttctgttctatttagaaaatgaacatatagacgttaatagaaatttgtaaaggttagttgaggctttatagtgttgtgagtacattattctaatgatgtttagatttatcattagaagaaacatcctatatattcagaattgagttcatgtatatgagttttttctgaaatgtgtaattttggtctatgtcttatttataaaaggttactataatgaatatttatcttcatgattcagcgtctctttggaaaagccttctatttcacaatattgataataactgatgagtatagcccaagtcttgagtgtaccaaggagaaattctgtaaagaagagacgaaagaatatttaatcaagcgtcatttaactatatttctgttagagtatttggtattgttaatcgataaattagaatgaatatctttggaataacactactattatgaagtgcacatttaatgtccattgtgtagtagaacaaagagtctgttttcattaagttgatttgaaaatttaaaacgttctttaagttttgataaatatgtagaaaagtaatagtttattggtcaatttattttcaacgatacgtatcaaattcagttaaattctggttgctgaaaatatttagaagtaacacctttagtcaaatttgatgattttcaaaattgactgataatattcttaaaaatatacttacttcattatcgctatgaaaatgaaaatattctttccatattcagagcttataggcaaaatagcattttaaacacattaaatgatgcatgtttgtgaagcagatcacaagggttcttgtgatatatatagaaatatatcatgtttcataaaatagttagcaacctaaacctatttgtcacttttacaattctaaaagtttcgctccagaattattatgaacaactcagaaaggacatagtactttgaagtataactatgattgattagactaaactaattccagcactgcattgtgtactactttaatctttttgaaaagtgaatgaacagcagatggcctaataaagacactctgtgtgctckctcagtgtggattggctctaagggaactggctcacactttagagtccatatatttgcaaaacatctgtcttagtcaaggcagatagttaaaggaaagagaaacttccaagctattggatatattccagtttggggctccatgtttggatgaactgttaataggacctcactttcacctttaagttcttctcagaaaagtattatctctaatagttcaaagtatatttgtaaatgtaattgctactgcattttgtgattatgttttaaagaaatcacctgcactttctttaattattactggaatattttagactgcattttttaattgttcatctgatgggtaaaatgagaggaaatagaataaaatagtattttaccattagaaaatgaagtttggaacatcacagtcttattttgtattgtatttgaattagaacagatatggaggaagagcaatatgtatatattgccatcatatttggtattttaaaatgtaaagtttgcaaattttaaaaatttacttttatattttgaaagcttaattaccctataatcaaagatatttattcatagcatattaatatataagagcatgctaatgatttgagaaactggaagaatgacagagggaatgatttgtgagacaaatgtttatttcatgctttttgcacaaaactcaaagcagtttaattaggagaaagtgtttaggcagctgtttccttttagaaaatgaatttctggaaacatgtatttaacatggtaatttcttcaaattggttatgyacactctagtgaaatgtatttatgaagcaacctttggtgcactggtatttttgtgtcttacagtaattacaagtagtggctacagccccagatcagcacatcagtattccccacagctgtatccttccaagtaagtggtcagtagattcttgctttaaattggcaaacatttatgtctatacatgtwttatagatggttggataatacttggatagaytacatatatagataaatatcctgtacaaatttgaaatggagacacccacatgtatcttgatgattcccttgaatatttatgtataccttgagaaaaatatcaagctcaaattagaatacattgcattttaattcaaattcaaaaatgctggctggttaaaaaatctaaagagattacattttatctaaatgtcaacacttcataattaattccatcattgaaattcttttgttggatttccagttctaataaacatatttttgaagaatatgccttattgtttttataactaatatagtcactttattgaggacagtggtagatatttcttaagtttaactatattgggtgtatatctgaattggtttggaatcagccagacgtgccaagattttgtattgctgatacatacacatttaaatatagtatgttattttctgcagcatctagagtgtctgcctttacatatatatagactgaaggttggatatccaatggggaacatgatgtaaaatgtggcatgatgaaaggaatgatgttcctttttttttttttttttttaaggaagcttcctacctttctttttctttttttaaatttccaattcttgggagcgaattcttagtagggcttttaaatagacttccatagtctttgcatagcattaagtcactcatggtgagtgtgaatttgctcatgagcatattaattagctagtgtgtgctccattttcctcatctgtgtattaactggagtgctatttcagatatgagcaagaattgtagacctggaagagacacaggtgtaaaatctaaatcaaatttctacttttacaggtgtggtatagacrtagggagtttaaatcatttgtctatggtcactagattggcttgtagcagagcctgagctcctgacattcagactgttgctttttcctatattgttaaaattatattgtggataaagaggattacttcctggatattatagggtttcactgaatctaggctgtctaaattaatacacagtctttgttgccacagtaatgctatttttctgatatttaggccctatccacacattctttctacaccagcagctcaaacaatgtctgcctatgcaggccagactcagtattcggggatgcagcagccagccgtctacacagcctactcacagacaggacagccctacagcttgcccacttacggtatttcacatcttctgttttcttctttggttataggcaggtaatcctgctggctggtagctttgtattctattgtaggttacaacttagaaggaaaatcatcttactaattaaatggtttacacattcaattttctgaacagatttgggtgtgatgttgccagccatcaagacagagagtggactttcccaaactcagtccccattacagagtggctgcctcagttacagcccagggttctctaccccacagccaggccagacaccttattcttaccaaatgccaggtaagtagctacacatgaaacatgttttgggagaactaattctttgagtgagactcattggcttcagactaggaatatccaatcatgaaggtagttttaagctttatcacagctcacacaatttctaaagaaagataactagacagaaacaygatgaaatrgttgagtatacgtcaggaaacatgacckataccaaacttaaatacttaagtttaagctgcgtaacatcagcaggaaaccaagtccaagcaaagcaactcccaagccagacaccaggtcagccacacatttggcgtctacttaagcaatttaaaagatctgtagcacaaaccagtattttcttttcactcttcctgaagtatgtaatgctgttttgattatacttaaacttgaattaactcttttctaagttccatatattattgaccagttgaggattttttgttcattcctaaaattcctctctcctattgatactatattgcttaataggactgttatataatatttactctccaatcctccatataggcatataggatcattaaatttttttaaattttagactcctattaaaattgtgttttatctttttttttttttttttttttctgagatgcagtctcgctctgttgcccaggctggagtgcaatggcatgatcttggctaacttgcaacctccacctcctgggttcaagcgattctcctgcctcagcctcctgagtagctgggattacaggtgtgcaccaccacacccagctaatttttgtatttttagtagtgacggggtttcaccatgttgatcaggctggtctcaaactcctgatctcaggtgacccgcccgccacggcctcccaaagtactgggattacaggcgtgagccaccatgcctagctgtgttttatcttaatgcaatagttgccaaaagaattttagtgacatagtaaaaactttaaaagctggttactatctgtcattttgtctgtactgcaaatcacaaatttggggctatattaacatatttgaaccaactggtatgacattttggtcaattgattcaaatgaaataattacttagatatgttcagctggaatagcagtgctcttttttacctagaatgtaggttgaaacatatttgaaagcatgctatagccacaaaaattcatacagcttcagttagccatgtgacagacagtatttttttttttttcacgaatactttcatactggttattccaggtcaggtcagtggcactgattacataatacattgctagtcaaaacacattgataaaacaagtaatcagctacctcaatagcctttcattttacttcttgacaagcacattccataaggactttttttttaggaaacctgtaattggcagctcacttgtttttgccctgatttgagaaatcattaaatttcagaccttgtagtaaagttttagaaggccctcaaaccctagatttgtgtaccataaacagttctcccttgagtctgaaccctaattcacagctatttttgttctaaagaaaagacaaagggaacaaaagtacaaggagttgctaaatggggttctgtatgtttatttcccacgctaaaaaccctgtacaaatgttgaactcaagtgattttttgtatgtaaatgcagttgatatggtttgaaagttccagtagtttcctggaggtagtcttagtctgtgtaagattttatcctttgcatacccctgcacttctagactcttaacccttgaatgttggcctcactccttatgaagactgttcccatgtgcttctgtttagctcaacagattcaataggaaagggtttaccagcygttacaagagggagagagctaagcctattttctgtataaatgtctcaacttcaaatttcactgtcttcacgacaaatttcaaagtgtttctctcacagaattctgcaaagtgaaatatctttatcattttacaaggaatacttttaaaatgcaatttgttttttacctctaggttctagttttgcaccatcatctactatttatgcaaataattcagtttccaattcaacgaatttcagtggttcacaacaggtatagtagctttttgygtttatgctttttatatgtatttcagatttttgaagagtactctcaggttgccatatatgtgcatactctcccagaataaggtttctttatttaaaaattatgatagcatttcaggatagtaaaaaattagctatctagaattcttggaatatgcattattctggctattttagattttttgattgctaaaggtttgtgctttaaacatttatgctgtagttgttttaatcatttggcatggaattacaaaatgtattggatattttgctatcttaaaatatactaagaacaattttatttttcttgataaagcagttattataatgaatattaattggttgaatcaatattaattgattaaaataagtcataggattatactacagactatataacattttcagtcctaaaaagtgtcctttgttactaaacaaaatgcctcaaagactactgttggcttttaaataayttttctgttttttagttttatgaatacttttaataaatgtttgattcccactttcctgacagctgcaactttttgcttttgtcactgtgcctgcctctggtagtctttagtcctccttctaattatgttttcttaatatttttgtgagttttaaaatctagcatgttagaattatgcatgaagcaagagtgaatgtccctgaataagtaaatcagctcggagtgagatgaattcgtgatatatgttgacacttccaaatcttttgtccttattttttgattttcagccatgttcgaagtagttgagattgaagagttagtggctgacttctggtctggcaatacactattttactttagtatagttgctagacacttatatattctaaaatgtaagttactgtacaagtgcttactttttagatttactgaaggaattttatcaattgctttattttagttttattgatatcacaaaaggcagaaaggaaattttgatcattaaaatcgtgtggaataataatatttttgataggattaaacggtgtaatttagcattaggaaaatgatgtcttaaaacactaaacatcagagccagtgtatacattttattttttaaaattgaggktttttttgtaacttgattttatgcatttatttattggtccagcaagcatttattgagcacttgctatatgttagatttttggctagggattgaagattcaaaacgagtaactcattgttccctgctctttagaaggattcagtcctccgaaagaaacaaatatgaaaataagatggacagagggtgggatgggatatagtgaatataataacagaaatatacactaggcagagttgtactataaaggaaaaactgctctgcctctatttgggaggattaagaaaagatttgtaaaggaaaagagcatttatttgaaaagagttaatcatagaacagatctgattctctgtgaagatttaaatatagtggatcccaatgtaaaatgtaatctgtatttgggaccatggcctgagcaccagtttgttgttttggctcatacctattgagtgcccataaagtgttaggaattggtctgtatactggggcacacgaaggtggggctggagtagatcagatctgattcctgcctcatagagcttacagcctactgggacaaacatacaataaaccagtaaacacacaaataaatgcagaattagaaagagaacagggcctgcgaaaacatcaactgaatataattttgaataggggaggttttatataaggcttctctatggaaaccacatttaggccaagacttctaagagttaggtgaagaaggagggcagtggtgtttcaggcaaagaaagcagagtgtaccaaatccccaatggatggaaaacttggtgtgtcactgaacttaaaaaaaaaaaaaaggctggagttcagttagtgcatgagggggaagtggggaagcacatttgcagagataggcgggggcctgctcacgtaaggcctggtggtttacaataaggaatttggattctattccaagcccagtgggaggctatgatagcattttgagcaagaaaattacatcatttaatttatgttttgagacgataactctgccaccaaggtctttggagaaagtcagaaatggaaacgaggagataaatttaaaaatgaatacattgcctgcaacaggaagaaaaggtagtttggacaagggggcgacagtggaaatgaaaagaaagtgagatctttgagatatgtttgaatatgaaaagacattatattccccagtggggaatagcctggacctttccagtatgtaacctcatcctcttctgcaggaattagtaggctaacagagagcttcagcacagatgtttgacttaggcactctgggtttaaattctagctctgaaacttactagctgtgtgactttgtgcaaatcacttaaccactctgtgccttagtccccttcaaagtaaaatgaatatagtattaagaccacataagagagtataaggattaaatgagtaaatatatctgagcccttagaacagtgctttgatacagagtaagcactatgtaaacatttgctaccactgttttactctgagagatattggtaggaactttgtttaaatatgatgaggtttttgttcttggctcacaagttacagtagtgggaaacattggatcttgaaattttcagactaatagaattttagttttctgccatattacttaatcatttatgaagatatacatatttacttataaagattatttcttttattttttggaaaccacatcaaatgtagatcttttttcctttggaacacatttcatcaggggatcttaatgttatcagtgatgaccaaggatttgtcatcactgataacattttgggctgacacatgctagatatcttaaacaccaattatcacaacaaatccttactcatcatcctactrtgtaaaaggattttgaatcattttaaggttcttaaaatttttaaataaaaagcaggtcaggggtgttgattcagtgctttcatttttctctgtaacaaaggagggaaactaaatcattgaaaagttcactaaagactttaaatcaaggcctcaggtggcatgtagtttgtgagaggctgggtaaaaaaaaaataataatattcatcttcttttatttactttttacctcctgccaagaaaacagaattatcagtggtagcccagaaaggaacaaaaatcacaaaaatgcagactgaggtctctgtggagtctaggaggggcagccccaactccttgctggtgatgttagaagatgtgtaagaacggattttgtgaatatgagctgattccatctccttctttcctcttcaaacacgtaggtcctgatgatgtaaatccttgaataagtaactatcaggagcaaagtgaagcatatgctaactttaatcacattaaaatttgtgtactggacctggtttgccaaaacaatagggtatttcactactatatgtttgtaagaaatgcccacaaagtagtctctgctcattaggatcacctcaaagctgtggactcagaaacaaatggggctgagtactaatctttcagttaccataatgactggttttcttgggagagtattaaagagtaatttctctttcaaacacacacatctcaattattgtttcaggattatccatcctatacagcctttrgccaaaaccagtatgcacagtattattcagcatcaacgtatggagcgtatatgacatcgaataacacagccgatggcacaccctcttcaacctctacttatcagttgcaggaatctctcccaggactgactaaccaaccaggtacagatcttcacccaggtgaaatacttttatatgttttgcaatatctaataaaacggagaaagtggacattccaaaaacatggcggaaagctcccagataattgtgctgatgtttaatctgtgttagcatgactgtgtaagacgaggctcttctggcatttcagaagatccttcttttagatatgggacagataggcgattttaatctctaaatgatggtgtacatatgaatatggagcttttgccagactcattattcatttgtgaagaacttgcaacaaagttgtaatattatcttccttatgactgatattatttcttttgtgctaaagagactgcataagcccttcacctttgtaagttgtcagtagctctagccmgtgaacatttcctacattcctgggatttgtagaatcagtgataggtagtttaatatctttgtgtgatcagtgtgtatttaaaatccattgtgtgtttcattatctgaaacttgcagtatttgaattgcatttgcgacacrtaatttgacacagctgaagtatttaaagttaaaagcaaatgtaacagagactcagtataatcctaagaaaagttccaggactttttggagaaattattgagrtgattctaaaatcacaaggaaaggtggatgaattagaatagtcaaaactatttttaaaaataagaacgaagtttgaagactcagattacctgatttaaagacttataatgtacagtaatcaagagagtgcaaaaggatagacacatagagcaatgaaacacaatggagagtccagaaacagatgcatatatatgctagaaaatggatttttgaatcaggatacaaaggcaattgagtagagaatgaatagtttttttcaacaaatggtgctagaacaattggacatctatatgcaaaagaggaaaggatctcaacttatatgcaaaaattaactccaaatggattgtaagcctacatctaaaaagctaaaactataaaacttctagaagaaaaaaatggtggaaatctttgtgaccctgggctacataaagattttatagatatgacattaaaaacacaattcatacaagaaaagaacagataaaattagatttcaaaaaattgtaaagaacttttgctcttcaaaagacactattagagaagtgtctgttcatgtccttcgcccactttttgatggggttgtttgttttcttcttgtaaatttgtttgagttcattgtagattctggatattagccctttgtcagatgagtaggttgcaaaaattttctcccatgttgtaggttgcctgttcactctgatggtagtttcttttgctgtgcagaagctctttagtttaattagatcccatttgtcaatgttggcttttgttgccattgcttttggtgttttggacatgaagtccttgcccacgcctatgtcctgaatggtaatgcctaggttttcttctagggtttttatggttttaggtctaacgtttaaatctttaatccatcttgaattgatttttgtataaggtgtaaggaagggatccagtttcagctttctacatatggctagccagttttcccagcaccatttattaaatagggaatcctttccccattgcttgtttttctcaggtttgtcaaagatcagatagttgtagataggcggcattatttctgagggctctgttctgttccattgatctatatctctgttttggtaccagtaccatgctgttttggttactgtagccttgtagtatagtttgaagtcaggtagcrtgatgcctccagctttgttcttttggcttaggagtgacttggcaatgcgggctcttttttggttccatatgaactttaaagtagttttttccaattctgtgaagaaagtcattggtagcttgatggggatggcattgaatctataaattaccttgggcagtatggccattttcacgatattgattcttcctacccatgagcatggaatgttcttccatttgtttgtgtcctcttttatttcattgagcagtggtttgtagttctccttgaagaggtccttcacatcccttgtaagttggattcctaggtattttattctctttgaagcaattgtgaatgggagttcacccatgatttggctctctgtctgtctgttgttggtgtataagaatgcttgtgatttttgtacattgattttgtatcctgagactttgctgaagttgcttatcagcttaaggagattttgggctgagacgatggggttctctagataaacaatcatgtcgtctgcaaacagggacaatttgacttcctcttttcctaattgaataccctttatttccttctcctgcctgattgccctggccagaacttccaacactatgttgaataggagcggtgagagagggcatccctgtcttgtgccagttttcaaagggaatgcttccagtttttgcccattcagtatgatattggctatgggtttgtcatagatagctcttattattttgagatacgtcccatcaatacctaatttattgagagtttttagcatgaagggttgttgaattttgtcaaaggctttttctgcatctattgagataatcatgtggtttttgtctttggctctgtttatatgctggattacatttattgatttgcgtatattgaaccagccttgcatcccagggatgaagcccacttgatcatggtggataagctttttgatgtgctgctggattcggtttgccagtattttattgaggatttttgcatcaatgttcatcaaggatattggtctacaattctcttttttggttgtgtctctgcccggctttggtatcagaatgatgctggcctcataaaatgagttagggaggattccctctttttctattgattggaatagtttcagaaggaatggtaccagttcctccttgtacctctggtagaattcggctgtgaatccatctggtcctggactctttttggttggtaaactattgattattgccacaatttcagagcctgttattggtctattcagagattcaacttcttcctggtttagtcttgggagagtgtatgtgtcgaggaatgtatccatttcttctagattttctagtttatttgcgtagaggtgtttgtagtattctctgatggtagtttgtatttctgtgggatcggtggtgatatcccctttatcattttttattgtgtctatttgattcttctctctttttttctttattagtcttgctagcggtctatcaattttgttgatcctttcaaaaaaccagctcctggattcattgatttttttgaagggttttttgtgtctctatttccttcagttctgctctgattttagttatttcttgccttctgctagcttttgaatgtgtttgctcttgcttttctagttcttttaattgtgatgttagggtgtcaattttggatctttcctgctttctcttgtaggcatttagtgctataaatttccctctacacactgctttgaatgcgtcccagagattctggtatgtggtgtctttgttctcgttggtttcgaagaacatctttatttctgccttcatttcgttatgtacccagtagtcattcaggagcaggttgttcagtttccatgtagttgagtggctttgagtgagattcttaatcctgagttctagtttgattgcactgtggtctgagagatagtctgttataatttctgttcttttacatttgctgaggagagctttacttccaagtatgtggtcaattttggaataggtgtggtgtggtgctgaraaaaatgtatattctgttgatttggggtggagagttctgtagatgtctattaggtctgcttggtgcagagctgagttcaattcctgggtatccttgttgactttctgtctcgttgatctgtctaatgttgacagtggggtgttaaagtctcccattattaatgtgtgggagtctaagtctctttgtaggtcactgaggacttgctttatgaatctgggtgctcctgtattgggtgcataaatatttaggatagttagctcctcttgttgaattgatccctttaccattatgtaatggccttctttgtctcttttgatctttgttggtttaaagtctgttttatcmgagactaggattgcaacccctgcctttttttgttttccattggcttggtagatcttcctccatccttttaaaaagacaagctatagacttggagaaaatatttataatacacatactgatacaggaattatataaatatataaagaactgtcaaaattcactaagaaaaatkaggttaagaaatttttaaaatatcattaatttgttcaagtatatttttctgccttcagttatttgcaagatccaaattcatctctacttctttcttattcagctttggatgggagggaaaatagggaaacatggtcacagtactgtaaactctttctaactggaccagtggggccaagatgactcaatgccattaaacgattatttattgagtatatattaggcatcagcactgtgctagaaactgatatttcagcagtaaatgagctctttgcccacctttggctttcatttgacaagcaggacaaatatcaagcaagtaattacaatagtgagaaagggaaaatggtaggtcatatgggggatattaacaagtaaactaatttggacataaagtaaaaatgaaactgatattttaagcaacagccaagatatgtttatatcatgaattgatgaaatgataacattcatgatttttagttccctgttcagaatataatctttacctgtgggtccaagaaataattatctagtagatagagcttgtctttgatgcccctacattttagttttttccccttatcttccttttatatcctcctacctgtgggcacacagcccctttgaatttctggtccttgtccctttggggctctctgttttggcttttcagctagccttagcctccctgggtatctgtaccccttgcagggccaggattagggtgaggtcagtgaagcacctagagcacaaaatttaaggtggaactcgttcttggggtccttaaattttgtgccctaggcgccttactcattagccccagcccaaatcacatgttccaaatctgtcatgatcctctttgggtcaatacttgtgttgcatcaaggatcttactttcattcaaagaatgaatgatttcagaatccttgcttaacaagcagtggagatacttcagggaaggagatatttcacgacctcttatcaccctgtggaaggtttttctcaatgatgaatgtgtgaggaaaacaaggtagggtgaaaccacagaagtatttaattatcaagatatcagagactgaatgatggacaagaccaaaagggtgtttttttaatttgctagactacagctaccaagaatgaaacccatttgtgtactcagatacggtatatgctacgtggagctttgtgtaaaatgttgcttttgctccaatttccatataatcacgagaaagctwctctgcaggaaaaacacagatggttactttccttattagaataatcagtattgaaaatagctattttattcctattaaatatattaaatgcaggcaggtagatattctgagtatgtgactttggatgtgacacattcacatatggaattctgacattcactatcagaatgctgcaatttcatcaggcyttcattggttgctgaggtcaagaaatatagtttgacatcattttcagattttattagactgtctgttgaatttaaagaaggaattaattctacttataactatattattctctcaaccaaaatcgtaacaacacacatgtctggatctttaaagaattctatgacctcagaccttcagtcaatgcagttttaggtttaattttgccttttcagatctggcatacggccaaaaagcaaacaagtttataactatggaatttttctttattattgatggaatctgatgtatttagttcaagggcaagaaaagtatttcccattgactggttctgcattttggacttaaagtagaaacctaaaattaaacccacagtttttcatakaacagtcactgctgaattctacttttataatgaaaacataccttatgttcaataagagacagctggtttttctgatttagagataagcctaatgaaataaagtgggatctaaatatccaaaacttaaaaggtgcagttattcattactgtactgattaaaggataattattcaaycatgtatagtattgggtcaagaaaagcctagggcaattttgtaatgactgatgttacttggaaattgcaaatagcattccattatttaatttaccttattaggtagtttgacagtggatttaaagaaacactaccatgctgattaagagcagacattttacttcattctctttctaaaggtctttctttaaagtaaaatttatattgggtmtatcagattttttatttgtattaagaaagtttgaggacagattygcacatgaagatgagaaatatttttatagcgcctccttttcaaatattttaaacatctttaaaatcaaatacagttagtcttgtataacaatattatgttttaccctgacactttgacaaacattacaatacattagctaaytgaacctaacaggtgctctagaaaagtaaaggatagagtaagatcatttcactctctgaaaagaagccagtttcttaggcagaacacagcagccttttgataacttcatggtatttcacgtaaggaaaggaagggaagtaaagtgctaactcatctaatggaaactaacaagaggatttagatagaaaggaccacattcaactgctctgccaatttacattttccctacctgtggcattgctatgcccttgtgcaattacctgagtgaaatttggcagaggcactggaattaacagctttcttcttttaaaaaaaagtgtcaacaaatgtttaatgactggttgagctcaagttcctggttttaccctttatcagaagaaaggatagcacctgcaaaaggaatagaggtcagtacaattccacctgggtgattgctctaggagcccagatgtatcgcatggcctctgcagggcatgctcttttgcttctgtgaagttctttcagtgaattctttggccctccatctcacagaaattatataatgcccatgtgacttttattttaatttattgtttaactgacaaataaaaaagtatatatattggtgcagtgatgggcaccygtaatctcagctactctggaggctgaggcgagaagattgcttgagtccaggagtctgagtctttaaaaagaaattgtatctatttttgtgtataacccattgttttgaaatacatttatattgtgaaatggctaaattgagctgattaacatatgcattacctcacatgcttatcattttgtggtgagaaccccgaaaatctattctcttagcaatttttagaaatacaatacattgttactacgtatagtaacatgttgtataatagatatcttgaacttactcctcttgtctagctgaagtgttatatcctttgaccaacagctccccagtctccctctccagccccacagcccttggcaaccaccatcttactcacttcttctacgagttcaacttttttgcactccacatataaatgaggtcatgtagtatttgtctttctgtgcttagcttatttcacttaacataatgttctctaagttcatccttgttgtctcaaatgacaggattttcttttttaaggccaaacattattccataatgtacatataccacatttcctttgtccgtttatccattgatgaacacttaggttgactccatatcttggctatttgtgaataatgctgcaatgaacatggaagtgcagatrtctcttcaacatactgatttcatttcctttgatatatacccagcggtgtgattgctggatcatatggtagttccgtttttaggaacttccatagcattttctataatggctgatatggtttggtggtgtccccatccaaaatctcatcttgaattgtaatccccctaatgcccatgtgtcaagggagagaccaggtggaggtaattgaatcaggggggcagtttcctccatgctgttctcgtgatagtgagtgagttctcatgaaatctgacagttttatacatgtttggtagttccttctgctttccttctccttcctgccaccttgtgaagaaggtgccttgcttccccttccccttctgccatgaytgtaagtttcctgaggcttcctcagccatgctcaactgagtcagctaaacctctttcctttgtaaattacccagtctcgagtagttctttatagcgatgtgaaaatggactaaatggctgtgctaatttacacccccaccagcagtgtgcaagatttctgtccgccacagtgtctcctacacttgttatttttcttcttttagataataccattttaacaggtgtgaggtggtatctcattgtagttttaatttgcatttctttgataatgagtcatgttgagcatttttcatacacctgttgtcatttttatgtcttcttttgagtgatgatcatgccaacccattgcccattttttatttgagttatttgttttttactattgagttgtttaagttccttgtgtattttggatattaaccctttatcagatgtatggtttgcaaatattttctctcactctagtaggttgttatatgactcttttataagtagaagcagatctaggtttgaccttctggtaacctgaagagtccattgctatttgcctgagaaagtatagccaaatggttaaaggaggagttctgcagtcataccagtgttgcatcatacaagctatttaattttgttaaattaattsccacttctccagtttctccattattaaaagacaataatgaaggacctaattcaccgggttggagtgaggtttaagtcagacacacacacacacacacacgcatatatatatatacacacataaatatatataatgtttcataataaagagctttgacaaatcaataagaaaaagacaaacagcctagttttcttaatgggcaaaagatttaacagttacttcattaaaaagaagatatcaaatgagcaagaaacatgaaaaagtattcttcataattactcatcaagaaaattataattaaaaccacagtgagataccatcaatcacacacccaaaatggtgaaaataaaaaaacgctaacaatatcaagtattgacaaggatgtggaacaactgaaactctcattgtggtaagagtaaattaatactgtctttaaattaataaaaatgagcagtgggttagcatggtcgttaatacactggaaagagagtaatacactggaaaaaagtcagtgtctgttaaagatgaacatatgccttccctctgacccaggaatcacattgccaggtatgcatacccaagaagaattaagagcttgtatccacaaagacatgtacaagaatgtatatagcagctttattcatagtagcctaaaattgtgaataacccaaatgtccatcaacagaatggatacagtgtaatagatacagtgtaatakatatatacatgaagaagttctagccacattaaggaaaggacaactgctatcccaggctagaatatggattatctcacagcagtgaatgaagccaaacacatatatttcaataaaaaaaatttttaaagaacartgcatgacatgtactaaggggtgaataaatgtagagttacccttcatagttttctaaaaaggctgtctttatccccatcaaaacacttctgcagatattttgtccaaattcttagagcccttttaagatccttcagtaatttgaaaagcatcaatgggaataaagtcttaggtttactgaaacccagatacgtcctacaaccacagtcttttctctttcctcttctgctcttttcacccctttgctgtgacagctgctggatcccagttcatttgaatagcagaattattcctgctaaactcctcctttatggactcagcctacaaccacccatgactggggttcctcaagtttttgtcctttcagctcttgcactgtgacaagaacaaagttgccttatgatagttaacacctgaaaattgatctataatgactataaggagaagttttatggaacgtcatccaaaatgttttttaaatgcatgcttaataagtgagggttaattttaatcaccattttatttgaaagcagacatttggtttgtgggatatagtaaccttaggaaaattctgtttcaaaaataattaaaaatggaacttttatgtgattttatttaaaagttggtgtatgttcagacatctaaagactaatttaatgcctatacaaataaggtgaaacatgatttactatgagacaaggctatattcaaccccataacttaaaaaccttattactctgctatctactctcaccgaggtgataacatagacccatgaaatgaactatgctggcaatattttaagtgcaaataatatttggarcacaggcatatttttttgatcatgtgctgacatgcacagtgtttcccaaagaaaatgttagaggttacccatgtaaaaattactatttctcagaaaaagtgatgcctagtttgttcagatttgtttatttagattaataactgcttggttttcctcagaattgttttattttaatttttaaatttaatgataaaaaataatagccataatatctttttgtttaaaaatcatgtaatttaaatttaatgtagtttaccttctgtcttggaaattgtcactttatacatataatttaaatcaaattaaatataaatcagatttatccctcagtattccagaaagctgccatgaaactgagatttagagagattgaataaaatgcttgtactcatatagtaattctgactcttcaacttgttatactgtatctcacagttgcctcagtttatcttaacagttgctcctacagatttgctactactcagtactctctacctcctaagatactttctcacaagctttaatcatttcagagttttagatatctatgggacrtacagaagtcaattggattctgaaactgaattaaagtctgaaacttaggatgtggcctagttggaggtataggtttatatgtgagtcatcacagagagggtcattaacacatgagagagttaaatcccccagattgtgtggagtgaagacagtgatcagaggatggaattctgacatactagctcataaggaatgggagaagtacaggagtccatgttttctagatggagatggactgatcggagtgattctagaactaggagagtgcaaggtatcagctgtcaaataatagtttcgaggaggtgctgtttaagagaatcacacacagcacagagatcctggaagacaaggactgagtctgtctattgcatttgtcaacaaggtgatttctggggactaytagcaggagtatttttatcgcattttggggaactgaagctagattatgataaattggatatcaataagtggggacagatatgccgtccagtgctgcagccactggccacacgtgactcttgagcacttgtcatgttgctagtgtggactgagatccagtataagcatagaacactgcacaacatttcaaagacttagtatgaaaaagaaaatgtaaaacatatcattgataattttatattgattacatacggatataacatgaatatattgagtcaattaacacattgattacatactgatatgataacatggatatattggggcaattaacatagaagtgatgataattttacatatctctttttactttttttaacatagctgataaaaaactttaaaatattatataagatcacatttgtggctcacatggtatttctgtcatatagcactagtatgcactattctaagaagttttatgtaaaagagaaaatggaagcaaatagtatctagatggaaattccaggtcagagggaaggactttttaacttctcagtgaccccaagaaatgggagaggtggaagggaaratgrgagaggtggaagggaagatgrgagaggtggaagggaagatgggagaggtggaagggaagatgagagaggtggaagggaagatgagagagggtttgactaatgaagcatgacttcctaggaggtggggctgggagtcaggtttgcaggtggagggatggaattgatccagaagaagacatctcattctctgaactgtgacaaaaaaggaggtgaggacatatctaaatggagataaatatgtaagtgaaggtatagacaggaagttgaaggcgtatggtgtagaaaagacattcaagtttaatagatcacatagattacaactagtaggagtttgtgtaaactacaaaagttctgactgacttgtgtgtgcttgggattataaatctcttttttgccatcaggaggtttctattgtataggaatttgttaagataattaataatgaaractcatacttgatctaaaaatgaagtgctattcttgacctaagtcatgttatctataggagagttcgataccatgcagagtccctccacacccatcaaagatcttgatgagagaacctgtaggagttctgggtcaaagtccagaggaagaggccggaaaaataatccctccccgcctcctgatagtgacctggaggtatgcctactcattcttaaagattgtagtgtgatgctttattttaccgaatgatacattctctatcttacagttccattatgtttcaaatttaaaaatcaagatatatcatgaattgaatggaactactttgtgataggcattttacaactctgaagtttgagattccatccattataatattaaaattaagaacaaataacagtataaaaatgatcttgatttacagattattggcctgagataattgcaagttttgatctaaattggcacsgacaaattttaaaactatagccattgtttgtgggatacttttctatgtagcactgtattcgatagcactaaagtaatggaagatgtccaaatgggtcattaagtttaaaaagatgaaagtaatttgtatagaaagaaaaattcatcttctaaaaataggacaagtttcaatcacttaatagtatgtgttaaaatctgaaaatttcattatatgtcactttctatttatgagttcttttgagatatatctgtactaagcagggttgatttttatatacaacatcagtagaaactattcttaaccataatatgttacttcttacataccacatacttcggttaagaaaaaaattgaacttccagatttagtaaaatcaagtgacagacgttgtgattctttataagagataacttccttttcttgaacaacagcaacaagttcacattgcctcaagaacttgacagatgatataaatgagtgaccgggctgagttgcccagcagactgtgaggagctcagagtgcaggcccattctgagggacctgcctgtcactgccatgtaggaatggcagccagcctggccacaacttctagttgctgtgctacagtcaaaaccctgaagtttgtgggcaattgcctagttctcaaatgttaattcataatttgaaatccttcaaaactccagggaggccaacatatctgctggcctaatgtgaccccaggatctatacttgacaattctgtttagcggttactcattgattcttttaaatatttctttaaaatctaattctttgcagaaattgtaaaagtttatgaatccctaaggtataaaactttaaaatatgtagagtttcaagcatgcttctatcataaagtctgaatgtatctctttttggtgttaactacgagtaaatgtatggattaatttattcaagcgaggacatctgactcttaagcttataatttgtataattcctgctcctcaggctttataggagttagatttggcaaatttgaaaaacaaaaaaatgaatagtattattttctattaaatgatatcaagatgatctctaggaagggagacattttctgcttgtaaagagatttctgtttccttggactttttaattttctgatatttattttttgtcttcagcgtgtgtttgtctgggatttggatgaaaccatcattgtttttcactcactgctcaccgggtcttatgcacagaagtatggcaaggtaagaaatcaagaaatgttactccaagaaatcttgttaaattttttgtgtttgtttaaaatcaagggctatttaaaaattcttttaagtgtttttttattgcagtctgtgaaatcttctcttaattatctatttctagtgtcttatagttctttaatatgaactggcaaatttaacaaagctaattataaattgaattccttgctatttcttcaaaaggactgagttttctacatcaagaccaagcttcttagtctcacataattattttagaaaaaaaattgtaaatcgaaatggacttcaaaacattataaaatcatatattatccccaataaaagagctttaagaaattgtttaaattaatttgttgcaattttatagcaatagcgagtaatctttcgtctgacagatcttttggatttatgaatgagtgttttttctgtgacttgagtacacatatgaacagcaaccgaggtaacaccccctcccatacacaaagtcagcaatagatggtctcatgcctcacctgcctttctctcttgctattgtttttattttctcttttatttatttatttcattgttattattattattattattattattattattattattattttgagacaaagtctcactctgtcccccaggctagagtgcagtgacatgatcttggctcactgcaacctctgcttcccgtgctcaaatgatccacctgcctcagcctctcgagtagctgggatcacaggygcccgccaccatgcctggctaatttttgtatttttagtagagacggggtttcaccatgttggccaggctggtctcgaactcctgacctcaagtgatctgcctgcccctcggcctccaaagtgctgggattacaggcgtgagccaccacacccagcagttatttttatagttagcttcttataacatcattattacaaacctctgtgagtgcttctccgaagactgatgcaactctgaaaggctttttggctagaaacacagctgtttaggcaataactgtttaagtcttagactctgtaggsctcataatcaaactaaagccaactcagaacatgttggcttactgtcagttactatactcaaagttgtatctttggttcctttacatatcacgcttacagaaatgtcttcctatgtcttcatagcattccattattttataatatctcaygctcatgcagtttttagctttgtctatattaagctatattaagctttgtcttctgacaagtaatgataaaattgcgttgaagtctagtcttcctaaattacactttgggygaatctgcattgtcatttggttttagtataggtaatgaggtaatggatatttctaaacagatgtgaaggtaataattttgtttaacaaccatttacaagaagtgttagcccctttatcacaaaagtaaagtaaattatacagaaatttggagtacacactcaatatcctactactgattaagtgtgcaatataaaaagtttccagactataatctgaagaatttattctaagtagtattggcttatcagaagtacacagtaaatcctgttgagctgattgcaatatttttgtgcagctaagtttcatattaggtaagtgtttaaaataaacaatctaataagcagactggcccaaataaagatcccttcaaaatagtcaccatgaggtgttacacctaaatatccatgttgcccccattgtgccaaatcagtggtagaactcatcttttggaattatcattagccttttaacatatttcctggcttcacatctttatccttttgtggtcattttgatctttctttaaaaatagaaagatcattcggacccaaggcggtgaataaggagcatggtaaaactgtcactgtatatatttgttttatttttgtcaaaaataccatagagtaatgaagctgcctttctcaatttactcataaactggctttaagagcaattccaaaagcaaagttcaacttctctcagcactgctgcgtcatggaaataaacctgtcagctcccaggatgtcgacaggacatgcagcactcatttcaacacacaagttttatttttccaaagtatttccctaaaaggttttttttcaaattcaaaatagagactctctatgcatcctctgtgcttctagaaggttaaaaccaaaagaaggagaataccaaaagggtggggcaaagcgaggggaagaaggaaactaaccattatggaaggctcatgatgcgccaggcaggaagcatcccacaggatgaaggggtaggctgttctctcaaagctatagatgaggaaacatatccagagaagtaataaaaatgtgtccacagccacacaaccagtcagtggcagagacgagtcctggggccccagattctttgaccctgaagccatgttctttctgccatagcacatcgcatggcctggacagttaatataccaggaatgcaatagaaaagtaatatttccaaacaggagtaaagacaattagtgaggtactgcataggcagttgggtgagttctcttttaagttgtaattttaatgatcttctctcagacacttggaatgtgttttcatcaagaggtaaaacttaagaaatattccatgaaatagaatatggcagacagtaatcagtatctgctggtggggcagaatacagaaagaatcagaggcactattggaaggggatgagaaagataaacttacatttataggatacctgtcctgtggttcagccgatgtttgacattttagaagcaatagggtggtggtgaaaggcaaaagcttttgagtcagataaacttaagttcgaaaatcgagttctgatgcttacagcattctgactctggcaaattacttaaatcttcagtttcaaaatctgtaaaatgggaataacaccatctgttagattgaccacactgaataatgtttttactcagagcaatttaagaaaactaaagtaaaagtgtttttaggctatattttttttaataaaaacaaaaacatccttgtcgaattccatgaaaaacaacttatattgccttatttattgaattattacatatatttctctaaaagttgttttatcattgacaatttacttaatgtaattcagaaaatcggcactgccttttagccagtaataaataatatcttggcatattgagaagtagctaaataaggcccatcttatgaagctatggaccacagacacctcagggttcacggcagatgggacagagatgacgttgggtagcttcagcttcaccacaaaccataactgaaaaatggtaaactagagcccctcagacagactgcattcatttaacaaatagttagtaatatcaatagacatgcttcttgctctcatggagcttacaaaccaaacaaaaaacaaaacaaaacaaaaaaaaacacatttcaggtattggtgacttctgtgaagaaaataaaactaggtcgtataatgagtgactggggtatgtgactgaggaagtgacattggtactgagaggagctagccctacaaattaagagagtgggagaattggaaagagcattccagcagtgggtgctgatcttccagtgttccaggaatatgaagtctagtgtggctggaaggttgtaaacaagagaaagaatagtacaaggtaaagggaaggaggtggaacaagttggcaaaatagaaacctccactgattgtcctccctgcagcaacaccaaattgaataagtatccacacaacacaaccaccttcataagaaccaaaagccaggtgagcaatcacacaatacctagttttaactcatattactgaaggaggcactgaagagggtaagaaagacagtcttgacttgctgwcaccaccaccccacaccagtcttccagcagcagctgaatggcacagagagagaatctgtgcacttgggggagggagagctcagtgagtgtaggtttttgcattggaactcagtgacctttcacagcagaaagcaacactgggtagaacttagccaacacccatggagggggcatttagaccagtcctagctagagaagaatcttccatctcagctgttggaacctgagttctggcaaatcatcaccaccatgggataaagtgctctggggtccaggcagtttaggccacaaggaccgcaattcctggacaagtcctgctgctctgctgggcttgaagccagtggactcggcagacacatgacatggtaagacaccagccagggcagccaagggagtgcttgtgctacccctccctcaggcccaggcatcacagctcacagttctagtagagatgtcttccttccacttgagggaggagaggaaagagtaaagaggaatttgccttgcaacttggatactaactcagtcacagaaagaaagggcaccaggcagagtcctgaggctccagttccaggccctggttctgagataacatttctacacacgccctgaaggaagcttgcttccttgaagggaaggatccaatcttggcaagattcatcacctgctaccaagattcatcactcttgggccctgaataatcaacagtagtagcaaggcagtacttgccgcaggccttgggtgagactcagagatgtgctggctttaggtgtgacccagcatattcctagctgtggtggctatggagagggactccttttacttgagaaaaggagaaggaagaataaaggggacttcctcttgcagtttaggtaccagcttggcaacagtgggatagggcaccaagtyggcatgtggggtccctgattccaggccatggctcttggatggcatttctgcacctgccttaggtcagaggggtgcccactgccctgaagggagagccctaggcatgaaagcattygccacaagctgactgaagagcccttgggcattgaatgaacatctgtgatagctacacattacttgccatgggcctggagcagtcaatagtggtcatgggagagaattttctgcttgtggaaarggtagggaaaagtgggaaggacttcattttgtggcttgggtgctagctcaaccacagtagaatagagcaacaggtagtttcctaatagagcaccaggtagattccagattcaggtcctagctcctagatggagccaggctctgtagacccaccagggaccaggggaacttgacaccctgaagggaatcatacaaacttggctagttttgccacctgctgattgtagagccttgagcaaacataggtggtagccaggcagtggttaccacaggctttgaatgtgacccagtcctgtgctggctacaggtctgatccagcacagtcccagggtggtggtcacagaggtgcttgtgtcaccctttccccagctccaggcagctcaacacaagagagagaccccatttgtttgggagaaagtaagggaatagaacaaaagtctctgcctggtaatccagagaattctttgagatcttatccaagaccaagaagagggcatctctatgagtctgcaagagccacagtattactgggcttgggtgcccccatttaatgcagatagcatacagtgaccaaaaacttagatcacaacacccaagttccttcagatacctcaaaagccttcccaaaaaggacaggtataaagaagcccagacagcagcgactccagtaaatacctaactcttcaatgttcagacactggtgggcatccacaatcattaagactacccaggaaaacatgacatcaccaaacaaggcaccagtgatcaatcctagagagatggagatatgtgacctttccgatagagaattcaaaatagcttttttgaggaatcgcaacaaaattcaagataacagagaaggaattcagaatcctataaaataaatttaacaaagatattgaagtaaaaatcaagcagaaattctggaattgaaaatgtaatggacatattgaagaatgcmtgagtctcttaacagcagaattgataaagcagaaaaaagaattagtgagcttgaagacaggctatttgaaaatacacagccaggggagacaaaagaaaaaagaataaaaacgaatgaagcgcacctacaagatctagaaaatagcctcaaaagggcaaatctaagagttattggccttaaacaggagatggaggggtggggctagaaggtttattgaaaaggataataacagagaacttcccaaacctagagaaagatatcaatatccacatgcaagaaggttctagaacaccaataaaatttaacccaaaaaagactatctcaaagcatttgataatcaaacctcaaagcccaagaataaagaaaggatcctaaaatcagtgaaagaaaagaaatgaggaacatacagtggagctccagtacatggcagcagacttttcagtggaaaccttataggctaggagggagtggcatgacatttttaaagtgctgaaggattaaaaaaaaaaaccatatttaccctagaatagtatatccagtgacaatatccttcaaacatgaaggagaaatactttcccagacaaacaaaaactgagtgatttcatcaacactggatttatcctaccagaaatgctaaagggagttcttcaatctgaaagaaagggatgttaatgagcagtaagaactcatctgaaggtaaaaaactcacaggtaacaataagtacacagraaaacacagaatagtgtaacactgtaattgtggtatgtaagctactcatactttaagtagaaagactaaaagatgaaccaattaaaaataataactgacaacttttcaagacatagtaaaataggatataaatagaaacaacaaatagttaaaaagcaggggaacagagtcaaagtgtagagtttttaattagttttctctttgctggtttgttagtttgttggtttatgcaatcagtgttacattgccatcaatttcaattaatgagttatattatttgcaagcctcatgataactgcaaatcaaaaacatacaacagatacaccaaaaatacaaagcaagaaattaaaacataccaacaaataagtcatctttactaaaaggaagacaagaagaaggaagaggaaaccacaaaacaaccagcaaacaaataacaaaatggcaggaataagtccttacttatcagtaataacactgaatgtaaatggactaaactctccaatgaaaagacatagagtggctgaatagattwaaaaaaaacaaaaaaaaacaaaaaaccgtgacccagcgatctcttgcctacaagaaatacacttcacctataaagrcacacagagactgaaaataatgggatggaaaaatatatttcctgaaaatgaaaactaaaaaagagctagagtagctatacttataatcatcaaagtggatttcaacacaaaaagtaaaacaaaaaaaaactataaaaattagacaaaagaaggtcatcatataataataaaggagtcaaatcagcaacaggatataacaattttaaatgtatatgcactcaatactggagcacccagatatataaagcaaatatcattaatactaaagagagagataaacttcaataccatagtcactggagacttcagcacctgactttcaacattgggcacatcatccagacacacaatcaacaaagaaacactggacttaatctgcacaggcttagaccaaatggacctaatagatatttacagaacattwmatacaacaactgcagaatatacattcttctcctacacacatggatcattctcatgatagaccacatgttaggccacaatacaagtctttaaaaattaaaaaaaatgaaattatattatgtatcttctctgaccacaatggagtaaaattagaaatcaataatgaggaattttggaaactgtgcaagcacatggaaactaaacaataactcctgaatgaccaatgggtcaatgaaaaaattaagaaggaaattaaaaatttcttgaaagaaaaaagtgataatggaaacacaaaatactaaaccctatggaatacagtgaaagcagcactaagaggaaagtttatagctataattgtctgcatcaaaaaaagaaaaacttcaaataaaccacctaatgatgcatcttaaagaactagaaaagatcagagaagaaataaatgaacttgaaatgaaaaaaatacaaaagatcaacaaaattaaaagttggttttttgaaaagataaacaaaatagacaaatctttaaccagcctagctaacaaaaaagaagactcaaataagtaaaaccagaaatgaaaaaggagacgttacaactatacttcagaaattccaagtattcttagaggctactgtgagaaactacatgccaataaactggaaaatctagatgaaatggaccaacaactagacatataaagctgtcaagattgaatcatgaagaagtccaaaacgtgaacacaccaataacaagtagagatggaagctgcaataaaaagtaccccagcaggcccggcgcagtgggttatgcctgtaatcccagcactttgggaggccgaggtgggcagatcacgaggtcaggagatcaagaccatcctagctaayatggtgaaacccygtctctactaaaaaatacaaaaaattagccaggcatggtggcgggtgcctgtagttccagctactcgggaggctgaggcaggagaagggcgtgaacctgggtggcagagcttgcagtgagccgagttagcaccacagcactgcagcctgggggacagagtgaaactccgtctcaaaaaaaaaaaaaaaaaaaaaagaggaagaagaaaagaaagcctgggaccctatgactttactgctgaatttttccaaacatttaaggaagagctaatagcaaccctgcccaaactattccagaaaacagaggaaggaatatttccaaactcattctacagggctattgttactctgataccaaaaccagaagaagacacattaaagaaagaaagctacaggccaatatccttgataaatattgatgcaaaaatcctcaacaaaatactagcaaactgaattcaacaacacattgaaaagataattcatcatgacccaagtgggctttaccccagggatgcaaggatggttcaacatatgcaaatcaatcaacgtgatacatcataccaacagaatgaaacacataaagattatttcatctgatgctgaaaagtatttgataaaattcaacatcctttgctgataaaaaaaatcttcaaaaaactgggtatggaagaacaataccttaacacaataaaagccatatatgacagacctgcagctgatatcacacagaagggggaaaaattgaaaaccgttcctctaagatctggagcagaacaaagatgcccactgtcaccactgttattcagcatagtactggaagtcctagttagagcagttagacagtagaaagaaataaatggcatccaatttggaaaggaagaagtcaaattagccttatttgtagatgatataatcttatttttagaaaagcttaaagattccatcaaaaaactatcagagctgataaaatcagtaaagttgcaggatacagaatcaatcaacatacaaaaatcagaagcatttttatatgtcagctgtgaacaatctgaataagaaataaaaaagtaatgctatttataatagctacatataaaataaaattcctaggaattaaccaaagaaatgaaagatctctacaatgaaaactgtaaaacattgatggcataaattgaagaggacacaaaaaaaatggaaagagattccatgttcatggactagaagaatcaatattgttaaaatgtccgttttacctgaagcaatctatcaattcaatgcaatcactatcaaaatactactgacattcttcacagaaaaaaacaatcctaaaatttatatggaaacacagaagacccagaatagccaaagctaccctgagcaaaaggagtaaaactggaaaaatcacattacctgacttcaaattataacacaaagtgatagtaacaaaaacaacatggtactgtcataaaaacagacatataaagcaatgaaaagaatagagtacctagaaacaaattcatacatttacagtgaaatcattttttacaaagatgccaagcacatacattggggagagaacagtctcttcaataaatgatgctgggataatggagatccacgtgaagaagaacgaaactagacccctatctcttgccacatacaaaaatcmaatcaaaatggactaaagacttaaatataagatctcaaactataaaactactacaataaaacattggggacactctccaggacattggactagggaaagatttcttgagcagtaccccacaagcacaggcaaccaagcaaaaatggataaatgggaggcatcaagttaaaaagcttctgcacagcaaagaacacagtcaacaaagtgaagagataatccacagaataggagaaaatatttgtaaactatccattatacaagggattaataagcggaacatacaaggagctcaactcaataggaaaatatttaataatctgaataaaaaccggtcaagaaatttgaatagatatttctcagaagacatacacatggcaaacaggtacrtgaaaaggtgttcccatcattgatcatcagagaaactcaaaactacaatgagatatcatcttaagacacttaaaatggtttrtatccaaaagacaggcaatgccaatgaggttgtacagaaaagggaaccctcatacaccgtttgtgggaatgtaaattagtaccaccactatggagaacagtttggaggttcctcaaaaaccaaaaatagaactaccatgtgatccagcaatctcattgctaggtatatacccgacagaaaggaaatcagtatatcaaagaggtatttgcactcctatgtttatttcagcacttttcacaatagccaagatttggaagctacctaggtgtccatcaacagatgaatggtaaagaaaatgtggtacattacacagtggagtactattcagccataaaaaatgagatcctgtcatttttagcaacatggatggaactggagctcttttagtgaaataagccaggcacaaggtgacaaacwttacatattcttacttatttggaagctaaaaaacgaactaatggtgacagagtagaacaatggttactagaggttgggaagggtagttgttgaggggtgcagttagtgggaatggttaatgggtacaaaaatatagttagacagaatgaataacatctagtatttgatagcacatcagggtgactgtagtcaacaataatttattgtacattttaaaataactaagagagtccaggcacagtagctcaggcctgtaatcctaacactttgggaggtgacgcaggagaatcacttgaggccaggagttggagattagcctggacaacatagtgagaccctgcctctacaaaaaaaaaaaaagtgttttttttttaattagctgggcatggtggtgtatgcctgtattctcagctactcaggaggctgatgttggaggatcatttgagctcagagattgaggctgcagtgagccatgttcacaccactgcattccagcccagatgtcagagtaaaaaataaataaaattataaaataaataaaagagtttaattggattgtctgtaacacaacaaaatgataagcacttgaggtgatggataccccatttaccctgatgtgattattatgcattgtatacttgtatcaaaatatctcatgacgccaggtgcggtggctcacgcctataatcccagcactttgggaggccgaagtgggcagatcayctgaggtcaggagttcaagaccagcctggccaacayggcaaaaccccgtctctgctaaaaataaaaaaattagccaggtgtggtggtgggcacctgtaatgccagctactcaggaggctgaggcagsagaatcgcctgaaccccagaggcagaggttgcagtgagctgagatggctccactgcattccagcctgggcaacagagtgagactctgtctcaaaaaaaagaaaaaaaatctcatgtatcccatgtgtatatacacctactatgtacccacaaaaataaaaaatactacagagatatatttatttatttataaataaatataaatatattcatttatttataaataaatataaagaaatatattcatttatttataaataaatataaagaaatatattcatttatttataaataaatataaagaaatatagaagagagaggtaggcaagggctggaccaggcaaggactcttcattatggtaaggtgtttgggttttttctggttgcagtgagaagctgttggggagttttaggtttattattgtctgctatgcagagaatagaatttagaggaataagagtggacacaagttgaccacttaggagacactatgcagtaagaatggccatgccttagataggaacagtgcttctgaaacttgagtgtgtgtcacaataacctgcagggcctgttgagcacagattgctgcgttacaacccagagtttctgattcaagaggtttgaggtgggaccataggttttgcatttggaacaaatttccagataaagctgatggtcctgggctgcattttgagaaccactagagtggagtatttcccagactttttttccttgagcaaactaatgaacatgttaattaatagtctttgagaaaaggccatggtcaaatatatttagggaatgcttacattttatagccattcaatgcatgttatcatattaaaggtcatgagatgtttaaaagaatcctctataactaagtttaatccctcagttccctaatgtcatcagtaataaccttgaggactgactgaaataaggttattctgatgattagttaagtcaggactttgcattgctaataacaaaagtgaccagagccattatttctgggaggggggaaaagacctttgtagtgttaagattgtctaagcttgaaattattatgggtccttaaaattattatgggtccttaattcttttcatttcttagatcagtcttatttccacaatatgcatkttagagtgtaacaacattttggtatagcatagtgatttttttgattattttagccagagattcctctacacacatatgaccgagagcatcactgtatagaacatctaagggcagaactgctctaggtaaaatgtacagatgggggactggagagatcccatttcccctacatgaccacccttccccatcattcttggtcaccatgaaaggtgttcctgaatcctggagcttgctcagaatacagcctggaaggcagtcgactagctgaaggagcactgaactaaaagtcagaaggacctcctgtgcctggctgtgcctaagggcaaactgtttgacctctgagcctgtttcatctgaaaatggttataattcatttccttccaggggttacggggtggcttaaatgagataatgtacgtatataaaaatgacactacacggtgaaaactatcatctacctcctaggttagagaaaattcataaaaatayaccttctttctccaaaatgagaaataactaaaggcagatgttttcagacctgcaaggtcaatgtttactcctgcaccatgtgaagtggcactgcagtggcctcaagtatagtgagctgggagctgcacctatgaagaccagagatgtcaatcatatcctgaaattaccatacctacctgcatatctacctgtcttkcttcctctccccgcacccataattagtgggcaatactgagtatcatttttttactggttactgtgcgcctggcccttggctgagtgtcctgtgaaatgcattctctcattagcttttcccatcaccctgtgtgattgattggtactaccatacatagctcataagtggcaagatcagtgaaatccgtatctctttggcaggttcttaatctctgtattctttggtctcgtgttctttccccacaacttgtaaaaataaaatgtgtggaccacagtaatgtaggaatgaccttttacccataaattgtcccaactaacttttgtgttttaatttaaaaaaacttttggaaaattctacttccatttataaattaaattatgtgaatttcccaagcatcttcctaatgggttatcactttttgaccctgttcaattgtcaacactgtcttttccaagcagaactattcctggacatttctgacgatggtgaatgaggaaccttgctatctgagccctgctgctatgaggctggtgatgggttttgcagctgagcaccaattgcaatgtacagtgtctgtgctgcaaaactctaaaataggagcttgtaaattcgacaggatgtagaccaggaatcatccatcaygttagagtttatttctattccctgattgtgtatatcattttacctgataacttgcagtgattccttttgttttcaggggagggtgaagaaagctatataaattgtgctttagggatttggtttatcttggatcattaatgtrtcatgtgctatgaagctatgatactctaaagttattccacagtaaggacacagaggaaatagcccaagtcagggggaaaaagtgaaggaactgcaggaaaagtgaatggttggctgataatgtgaaactcagattcagggtccccaaactgcttgcttattttagacaacatctcatattaacagcagtgctggcaaaataatatgtttatcagaattaatcaattgattgcttgtrtattgaacagtctacacacatttgtgcagaaaaatacttctaacatagcatttggctggattttaaatgataggctagtcatgaagataaatgctgatgtttgtgcatttggactaaagaaaaccaacatggtttaatagaaagtaatagaattaatcaagtgttagaaccatggatctgaggcaatcctaatggcagtgctaacaaacaccatatgcttagagggctctggctttggagggagaatgaccctgagttcaaattctgcctctccctcctagtacccatgtgaccttgagtagtttatttagcatttatgagcctcagttgtcttgtatataaaataaggagaataataaaagtagtaatttgattctgagggttaaatgagttaatgcattaaaactcaccacagaataaacattcagtaagcataacctatttatttagtttcaaggaaatctggaatacaggaaactgaatttttctaaggaaatttgcattttatatttgtatctgttattttacctcataatatgagtcagtcagtgttgcagagaagtagcactatgccagggtgactagagagtggttttggtatatattatataaaaggaatgattacagaatttgcaagactcaaaaaatgcataatgtttttactggtagcttatagtaagtttgwktgtgcatgtgtatgtatatagtgtgtacataaatatcatacatatgcatgtgaaaataaagccaaatcaaagacagtgacatatctcgaactcttccctagggaattggggaatcattgctacctattgtctcccctttcagagcttcgtgttgagtatatgtttgagaatttcttttaaaaattaaatggaatgactctgcgtgatctcatgaatagccaaatatattcctaacttttatttaagcccatctttagcaagtaattgctggaattatgttagaaaaggggaaagatcttgaaaggacatcacattgattaacttgaagctaatataccagagagataatggtaactaatctcttaaaaacacatagagcaaccttctgtaacctgccctgaagttttcagttcctttgatctcagttgatgatcatttaatctcatatcttgagaaggtgggggattagaacattaacttaccttaagtattctttaaccatcwtcaaccctctcctaggcatttcctcctatagccatctcctaacatgtcaatcacctttctcctggagtcctgaggagcctcgtgaggtgtgtgtatttgccacctctgctctgccacttttctctgggccctgtgctttctagcccatcctcccaacatggtatttttctttccatccaagtaccatgttacactgttgccatgtactaccactgtaattccccccttgaagtacatttattctgttattagtttaatacatttggattcccttctgactgaaactgtagaagcctctagtggtaagttgtgtgatgatccccttcatcayacaatttaagcttgacaacattaactactgttcaactgcaaatatgttgcttacactgaacacttgaattgtgaacaaaatcttttaattcaaaatgtgctagcttttcacctttaccagctccccagcaggtaattggctacattactaagaaaaagacaccatcagacatttggtccttgaagttaagtccacagaatgatctttatggaggtgaagggtggaaaaggcactcttcctcataagcaactctagagaagtctagttcccgagaaattatactaagccacagttctactcagtgatcacgctggctcaagtccagccgtcctgtggaagcaccacagaggcttaactcttggaaagccagaaggtcatgccagcwctgatttttcttaactatcccagtctctcattataatatcttatagaccagtatttattcaaaagtaacatgtatatgaatcacctgataatcttgttaaactacctggcaaactagatctggggaagggtctacaagtgtgcatttctaacagtttccagatgatgccaatggtgctggtctgtgaaccacactttgagtagcaagactgtcatctgctgactctcaatttcgtttgtacattggactcactgcagagctttagcatgactgatgcgtggacccacctcagataatccgatttagttggtatggggtgtggcccgagcaacaggcattgtgaaagctccacmggtgttccccatgcatggtggagtctgagaactcctgtcttatatgtcatcctcccagcttggagtcctccttatgtaccactataaccctacttttccataacgcctctctatcctttcctcattatttctccatcagaaaaccccactgactgcctgtacctcaacagttgaatgtggccacaaatctcaagtgggtgcaagcactcttggggtcatgaactcttcctattggaggttttgaagagctgaagggagagcaagcatatctctcccaattctgtacaaacctcctcaattactagggggaaaaaagcaaacaaatgaattctgtcatctttgcaccaccaaatccgtgcctcctacatctgtagccatagatgtctcttgcacctctcttgcaccctggttccgtgctccctcacctacccaaagaatcgactcctgaaaggacttctttcgctaagccaccagtttctcactctcctagattcttcccatcaccatcgtatctgctgtcacattcctgtcattagaagagcttcttgagcccattttcccctctggtgactgctctccttctctgctctttccagctttgccataacatgacacttgccaagtctgaggagccaccttgttgccaaatcaagtgttccttcttggcttatcttgctggggcctctcacatacattcagtggagcactcttgcattcttaaaatccttgtttcctttcccttccctggtcagggtccctcttctcacacacagactcctcacctctgggctctgtgtatgttcgctactattgcacctgttcatacctagctccctcacctttgtcaggcctctgtttctctctctgccattacctcctgaaagggggcttctctgaatttgctttaaattagccctttccactcatcctcatcacttctgtatctgcttgtcctggtttttctttcatagctcatcaccacctgaaatgcttatactcccttgttttcttgtctgtttatcagatatctcatccagtaataatataaaccacataaaggtacgggctttgcttttttggttatctgctctctgcttggaatttgaacgtgtctaatacataattagtcactcaataaatatatgatgaataaatgaatgttcctgaaaccattttccagttcctcctaagaacctgtaagcccactacctatccatcatagacaagtatcacaattgtaaaatttctgttctgatttgtgactgaatttcattttatctcttatgatttaaagagtatatgtattctaaaaaatccagtaactttttccaccttggttcatggagctggtctgccttctttcttccatgatgaacttgcatatcttctatctttgtgtgcacatgtctacacatatgctacgggtcccaaaagaataactgtttcaagaggttgatgtctttaaaaaacaaaaaaaaacgtccttagtttctttaaaaatacataattgctgcctctccagagatatttttacagtgtgtccctagaggaggaattccagctgatggcccaatgcagggcagaggcccgtagacagacagtctggctccaatttatgctctgtgttcacatggctaataggcgttagtattttgatttagagaactgctgtactggatcctgccctggttatacactggcaacatctggcttagaaccacacatttaaaggccaagagctatttattttcttcatcttcctcttctctctctctctctctctctctctyactctctctctctctctattcagtaaaatgtctggggaatagtttcagtattttgatagagcagtacacagaataaattggcagtagttcaatttgcttcctattaaactctgttgtagacactttgaaccttttggaactgttataatatgtataatatatwtcagaacttccacaaaaccctgttagtgcctttattatcccacttttttcctctatccaagattttgctatcacctcattttagaccctaaactcaacattcactacacttaaatgcaaattaaaaaaaagcaactcttgattcataaggtgcccataattctacaaacatctaatgaaaatgagcaaacatctctgtataaaacttgggttcaatccagaagtatgtttcattctcacatgcctgataaaacagtggaattgcaggtgctggcagctccctcacagcagtttggcaagatggagggtgcccagcattgctaaggctacacccaccaaatgtccagtcatctttctgggattcttggatctgtgagtcctttagctggaaaaatgcagtgctgtaatctgctcacttagaattagctgtcccagtgacttagtaagctggaaaaaaacaaaattaaaattagatatttgaaagtaagcctgccccagacattctcttagaaacaagatcaccacctcttacaggcatggttttccttggctgatggcatgactagccctggcccatctgtgccaagactttggcatggctgatgaaacctctctctttcaataggccttgctctctggaaagcttagtaaaatacagctagttcacactccagcaaaccacaaacctaaactttcccagttacaaatgatattttgccaaaatgcttactaagtcctggctctcacagagtgtgtgatgtggaatctccacagcttgaaaaacaaatgaccarccctcccagtgccgtggggttgcattccagtggagtgctcaactacagtttttatcacaccacatgccatgcttgcttgctagcagattcttgcattttgctttttttaaaaaaaattatgcttgtttgcatgcttatcagatgtacaaaatgcattcttcatggattttcctatcactgtttgggtagcacagagttacgtacttcagaagcatggaattgatcaaagtaacaatcaaaaggaacagtatgttttctcccatccccataaatctgatctgtaaatgcaaagaatgtgaagaatgaacataagaaattcaataatggtatttaaaacttaaaaagaaaaattggcaaatcataggataagagcctaaccaacctggtctccagaaggaaaaccttttaaatcagatatttctgaactcctatctgaaatatatatctttagggcagtaatcatcagaaacataacagwctagtgtggagctcagttttattgtcttgcatcagtgaacattcctcagaagcacagagcgtcactaatggaattatatgttttcatgctataattacatttgatttttcctgatatttctgtagactttgttcatggttccatgactaggcagaatagtttcatagaatatcctcagcctagttaatgcctagttcccccaaccctgtcaaaaagacagagactaattataggaatttttcaaccaaaaaagacaaaatgttttttttttaatttacacaacctttagagattttatttcaacaaaaacatgatcaacaaaatgaagaaaaaagaattttatacttgaaggaaacagagcaaggggcccttctgagctctgaaaccccttgagacacaaactggcacttattaatattttttttcttttgagatactgtttcactctgtcacccaagctggagtacagtggcatgatcttggctcactgcaacctccacctccaaggttcaagggattctcgtgcctcagcatcctgagtagctgggattacaagcacacaccactgtgtccagctaatttttgtatttttagtagaaacagggttttaccatgttggccaggctggtctcgaactcctgacctcaaatggtctgcctgcctcagcctcccaaagtgctgggaacacaggcgtgagccactgtgcctggcctacttattaataattttattcttgtttttaatgaatatttgttggctaaaacagaactgatttgatctttgggtatatagtcccaaatggttctgtcactggaagacggatgaatccggcagcacagtcaagctaccggatgacataataccaggaggccatcagatatgtgaagagtcagcatccattactgagaaatgagaatctctgcctatgaaatccacataaatctctaaatgagaagatgcaaacaattagaaaattatgttgaaatccagcgtattattatcttgtctctatcttcactcacatcgtcttagtttagctctcataccccagtgaccccttagcactcaatgcctttttcttagcatttaattcctattctccaggttttcatggctatagaacacaggatgacatctcaaatatgtttacactttagggcttccccctcaaaacatgatgaaaggaaatataggaataaaatggrttatcatagtggaggtgtggaatgaagagtggtttctccttgcaaatggaatcagttcagggtgtagatgaatactgcttggcctgacctgggttgcaggttcttatcataaattgagtaaagtttgcattacatttccccaagttgagatacatttcttgaaatgccaactattagaacgttgaaaacacaatttcggctctctcttctcaaatccctgcagtytggctcctggcccagccactcaacccaaatcaccctctgaggtcttccaaaataacttcccagccaaaaccaatagtatccttctagacttgtcagctttattcaaaaccttattcttctccctgctaacacccatctggtctcaaattttaagggtttgtcccttccaggttttttctttctcttatcttcggagttgcacctatgagcagttcttctttagacatcattccaactttgataattttaaacacaatgtttgagcatgaattacttccctattcccatccctatccccaaatgctcctttctttttagtcttatatctcttgatgctaggccttcagctgcagttaattatggtaaagtaacaactctggtcttgattttcgacttcttgctgctgtttaatatcttggtttctgtaaacaaaaattgagtcattttaactctttactgaccccatcacttcccaaagcatatattttttacctggattacacttagagaactaatgttcttttagctattctcacccctcccttcttcaaccttagtcaaatgcaggttagaccaaactctacacatgtttggatagggagattcctcttaccttgttgataaaaatgcaattaaaaattaagtgatggtcgcaccatcctctgccagctcttcctgtttcacctccagataacattctctactcaagtcctataaatacccagttgacctatttttctctatcttttaattcttattatttgtcattattcttaaaaagacatcctttctttttagtaagtttgctccattcttcagcaccccatccaaatacctttctccagaatactttccatagattatatgtaaactgggtcatatgaactagctgatttccttcctccttctctcctcaacatacagctttatgtgaaaatgtatgctgagtcatcgttacgtatgtctgaattcccaggtgtgtctgtgcatttggtatgtctgaaccttctggaaagtcacctttttggaaaactgagaaatcttttgaatcttcagtaaaaacccatgcagtctcctccctcttccaccacagcaatatgtgcttaaaatatttttaataataagcgcttactgaaattttacctcattatgtgtacattttctttacaggatccccccatggctgtaacccttggactccgcatggaagaaatgatttttaatcttgctgatactcatttgttttttaatgatttagaggtaagaattttacaaggtacnaatagttgtatccaacaccagacctcctagatggtttctgtatctgtagataacctcgagaaaacagaaagataaaaattcagctcaagagaagcataaagttcttgtcaagaggaaaaattgtatatacaaatataagcagaaagttaatttntgttcatgaataatacatatgtagaacaaaaatgtctctgaagaggagattgttggctttgctgtccttactgtccacagctgtacrtgactcttggttcttttagtgtttcagcattagctcttccagattattaacccggaacctatctaggttaatcactaaacgatattcacagacactattcatggtgatagcgtggatcaattaattttgtggataatctgaaacttaactttagctaacattatcattccccgtttctttcccttctggataaaacagtgctagaactatttaagcacatttgatgcatttaaatgcatttattttctcattttaaaaattatgtttctattttcaacctcaaatggcaagacagtgtctaaatggcaaataagaggaatagaaaataaaaatcaacagcaaaatgaaacgacccaaggaaaaatagcctcagagtagttgaatgtgtactgcaataaagtatgccatctgtgtgctaatgacctaggttattagacattcagataatagaattcgaaataactaaatagttcaggttcttggcagaagtacttctcagtcaagcataactatgctgaaatagagatttctctttcattttttttcagatggcatgtttaaatttattttttatctcatagtttcataattaaagtttttatctatagtcatattatgaattgagagggagattactactactgaacccctaccttgttctagatattttatgttggactttccattaattacttaacaatgtattgaagtaaatgtgtttatcacattatttatgcaagggagaaactgtatggtccacaacatacaaatcacatctaaagttacctgctatctaaatggcagaactggaatttgaagcagatttgcctggctccagagcacatacttctgacccatcctttgctgaaaattttacaagtgtgtgagaaagaaaagccaagttattgagttacttaaataactttttttttttaatgctctaagttctggagtacatgcgcagaacgtgcaggtttgttacatagatatacacatgctgtggtggtttgctgcacccatcaacccgtcatctacattaggtatttctcctaatgttatccctctcctagccctccaccccatcacaggccccagtgtgtggtgttcccctccctgtgtccatgtgttctcattattcaactcccacttatgagtgagaacatgcattgtttggttttctgttcttatgttagtttgctgagaatgacgatttccagcttcatacatgtccctgcaaaggacatgaactcatcattttttatggctgcatagtattctatggtgtatatgtgccacattttctttatccagtctatcattgatgggcatttgggttggttccaagtctttgctattgaacattgctgcagtaaaaatacatgtgcatgtgtctttatagtagaatgattaataatcctttgggtatatacccagtagtggaattgctgggtcaaatggtatttctagttctagatgcttgaggagttgccacactgtcttccacaatggttgaactaatttacactcccaccaacacrccagttagaaagtttttttttttaaatgacaaggtcttaaatccagtttgagttatatttgagacatgagagtaaaaatgagtggttcagtacattccataaatgtgtgtgctgaaatctgtgtaatagcattttgctgttgttgttgttgtttttctctatggtgagtcatgtttttactgaataatacaattactgtctgtttaaagcggcattcttttttttctacagtggacagtatgaaagctcatattactaggcaagctttcagttttagataacaaataataatcacctctctaaaacctgatttaaattgatcctgctacttatgaatacagaatgattttatatatatatatctggtaataacaaacaccttaacctttccacaacttgaattttttacatacagcgataacttttggggttagtttttctgttgatcagtatggatgagttgcattgtaaagaggatcttaatattattagtcttttcaaaggtataaaaagaaaaaagaaattttatgtggtagtatccaagtaaaagtgcttatttcatttggttaattattttttactggaaataagtggaataaatgaacttttagcttttgtagtggcacattagaagccagatggaataaatttgctacccaacttttaaaagaacactgcagtgagaaggtgaaagtagcatataatgaatttgtaactaactagcaagtttgaaatgaatattggtatatcaaaaacatgttgtagtcatgtatggcacttaaagacatttattttagttcaggtactatgttatatgtatttcaaaaatacctggcaggatctttggtagaagtagttcatgagaaaatactggtattgactttctcttctctgagtatatagctttttagttgtgttttagaatgtgataagaatttcatttgactcaaaccctagaacttagctattcaacaatactgtacttaatcaataaaataattgagtttctgcagataaattgaactctcactgtatatgcgtgccacacaaatgcttgcacatccagataaagtgcccaaggaaacataaatgatttttactgacttgagtaaacaagcactaaaaccaatagaatcaaaacagtagctttcaaaagcattcagtacagttacatacatagcgccctatccttctgcatctgactttgaaaggcagttttactttcacacaactttttatttcaataaacctcttacagccaaaaattgtcttgggctccataactggaattaaatgatttctactcttgttgacaaaaagaattcctcaagagagtaactctaacattagcttattatgttgtcattgttgatgttgaatatttaagctctcagggtgcttttcttaaaaaaaaaaaaaaaaccgaaccatctaatttgacactccattctttcagtagatactgcaacatatatagtagcagctgttcctcacataattccttaaaagatacaaatttaaatcctcctaatagacacttcactgcatcctgcccaactgcagagaaggcagatgcccaaactaccctcccccaacagaagagaatcctgtgtgtttaaataaagtgctatttcggttagaataacctccagaaaagaagtctcaggaagtttgagatggcaaaggtgagaaaagactgctgtgaattataactgataaatatcagtgaccactttttggtcactttgtgagacaaaattaaagtatttaaagttagttctagaatattttcaaatgtttgagttttattaaaatttgttaaagccaaaacattacagtgtttttagtatttcactttttggtcaaaatgattcttacaaagtttctcagagtgaaaaataattgaaggacaattatttagctttttctaaaaatgtaaataatggaagttcaggtttctttcactggaccgtaatcctcaggcaaccgtccagagtcaacaggcatagttaactaggcataaatttaaagaaaagttaaatttggaaaaacctcaaatataacctcaattatggagcttatggtccaataagtgtgatatactgttgtcctcaggagtaaaagataagtttttgggcaacctatgtacaaattaatcatgcgagttaatatttaatgtcagaggaatttctctaaaaattacaatgagaggatattaaatagagaaataacttctgattaccagggaaatttrcaaggattcctccacttttttgaatgtcattaatttattataaaagagaaacacagaagttatttacatgtggaaagatttcagagcttcaatggaatgggcaacttcatgtgacaccatttcaatagtgatttatttcagtctacggactttccaagtatgtcaccatctctaaataagaaataatctcatcatttagaactactttggtgcctccatattctgggagaaaaactttatttccaacccttatgctaatgggtaaaatctctccactcttttccttaaagcccagtccagcagttactatcattgcttgcaatgcctttactggatgtttttcaggaagcataatgcctcctttggttacagtttggactgcactcctttcagccaatacttggtcaaagaggggaagacattttctaaatacctgtccggccaggccattccttgggcagtctctgcactcttctctctcccttccttccactcttgacataaatatcttcttactctcctcaccatttagaatgcttttattttatatcatcgtaaccttgtgttagaaaatttaaatgattgtggtaatcctgtaaagaattagcatttgtctagacttctcccatttatttaagaaagaattgtggagtgattattctatgctagattgtgccgtaagtggggatgtaacctggtgaaccaaatgccgcactccagggcacttccagtcagattaaatttggggacccatacgtgtaggtggagatttattcaaaacttactaaccctgtaatttctgtaaattatatgaacttttaacttacctggattttcaagttacatactcagaaggtactgattgggctagtcactgagttttgtatattaaaggaagcctgagtcaactatacctttaaactggaaccggattaaacactttctgtgtggaaatctggagactaggtatgaaatatttgactgccagatactttcaagcccaataatgaatataaatagtagctttcaaaaaacctttgtttagtatggtgtattttcaaatttaatgatttttttwaaaaattaattttgaatgctaagcactatgtatatagtcagaagctgtaagtatgagtaaaatactttgagggggactaaggaggcccaagatgctaaaccatacttactctgaggttaatatgatgtagttatttattataaataatttatttttatttattatatatttattattctgagaactaggcattttaaatgccctcaccaaatttcacctttagatcttgtaatattgcgctggaactttgcagattatttgaagatggactaagactcagaacagcaaagaaggatcaaatccttatccacataagttaccatttgttctgagcacacagtaacttacaatcaggtcaactgtggccgggcgtggtggctcacacctgtaatcccagcactttgggaggccgaaacaggcggatcacaaggtcaggagatcgagaccatcctggctaacacagtaaaacatcatctctagtaaaaatacaaaaaacccaaaaaaattagccaggcgtggtggcgggcgcctgtagtcccagctactcgggaggctgaggcaggagaatggcgtgaacccaggaggcagagcttgcagtgagccgagatcgcgccactgcactccaacctgggcgactaagtgagattccatataaaaaaaaaaaaaatcaggtcaattgtgtgggtatacttacataaagtttattttgcttggaattttgtagcacatttgagatgataaatcgtcattatttcccttttacttaaaagtagtctttttgatttgaaaatttaaaaacttgacaaaaagaaaatgtcaatatctatgatcattaccctttttctgtgtcaaaagactaggaccttgaaataacaccagcatggttctttcatggttctggtccagcaggaagtcatggaaattccacaggacaccataatctgaaggcaagcccctctgttgccactcaacaaatgataaataatagtaaccatctgaggtgttcagactaagttttgtgtatcttcagattagccatgcttaagtatgcacaacagaaatggcctggaagggaactcaaatgcttatgaagattcaagagaatttcttatcaataattttaagattaaaatttttaaattgctctaaagaaactctcatgccgtatattttctcacccctcctttctatggaactcttctggatttaaattttgtggggtagaaatggtgccatttcccaacagaagaaaacaagagtgaggcaatgagatggacgggcacatgctgccatcttctggtggtagtctgatcagatgagaagatgggaaaaccttcaagcatggtaacaagcatcatttagaaaacaaataacttttccaatgtttttaacaggagtgtgatcaagttcatatagatgatgtttcctctgatgataatgggcaggacttaaggtaagctatgcctttcagtatgctgtttcctacagaaattcggctgtggagttttgcacatgtaattatttctttttaatgtattttgggtgttacagtacctacagttttgcaactgatggcttccatgcagctgcaagtagtgcaaacctttgtttgccaacaggtgtaagaggaggggttgactggatgaggaagttggcttttcgttacagaagagtaaaagaattatataacacctacaagaacaacgttggaggtatgtgtggctttttcaatctaacaaaggtactctgggtataggtagaattcaatctgtagtttcatgttaaagatgattctgctgtaaaagaaacaagcaaaagctcatattaaaccacattgagccagaagtttcttagaattggtgggaaaaaatttaactacaaaataaaacatgcaccaccgtcacataaattgggaattctttgtgtaaccttgtgcccagatgtttggtcaagatttataccagggcatttagttgaccctttatcagctggtgcttggagcattatcagtgaaaatcagacagaggaactaaccaaggcaacagaaagaagtcctttctcaagtagagagcctcaatcattgaaggacggtggttagcaagcattatctttctggaatcccatcaaaaataaatataaacagttattaatgtcatttcaaagactttcaacaggtttattttatcttttaaaaaaatcatgttttatgtcagtgtrtcattctcatgcatagtgtcaactatgattatcatagtttttaaaagttcaaataatctgtaggtaatatcaaaaccattttataccccttcatatattttacaggtgatatcaaaacctttgctatcaaaactgtgatcctggatgtgcttctatatataaaataaaccttggtgatatcttattagaatcaattttaggtaaacaagattcctaaaatttgctattaggtcacatcagattaatctcccaggattttgtttctttatgtgcttctctttttttctaaaaaggaagagtaattgaggaacataaactagaatccaatatactaaatatacatgtgcatactatacatacatatattcacatatatatcatagaatacaatatagtaaataaaatgttcatatatagtatataatcacatatatccatatacatcatgagggtggggctatgtgtctggtcaccttgtatccccagtgcctagcagtgaaacacataagagatgctcaacagatacatartaactgtaagagaacaaaaaatgtagagccaaagaggataataatgttagcaacaaaagggagcttagatatggaagacattcatttccaaaaagaaattgacccctgcaagctgccgacttgcatggggtgctggggagaatctctgatttcctgatttgctctagtgctctgtacatgatgcttttgtaaaatcaaataagtagattttctagttaaaatcartggtagataatatgttttaactttaaaataaatatccccttgggaaatctgagttaatttttatcattcagatgtcatcatttccttcttgcggtgtattaataaaattattttaagttaacaagaagactaagaagtaatcttgtatcttagaaactttaaacaaccacgagtctactttctgtcatacgtgagcatctctctattataatgaggacaaatgagacttgctagaaactgtaaattttgattgaaaaaaccatacaagtgtgtatgtgctcccgatattctaaaacacaatttcaataagaaaccttcctttttaatggatttacatgatcttgttttatcataaaagcaagaactggatcttttaaaataaaaaattagcacatctatcttttttcttttaacatcaatattataattcatgattgtaactgtcctacacttcatgattttaaacaaaattattaattttttacatagcaaagtatttatagtagcattagcagtagtattagaaacattttaacagctacatatgatgatgccattgttactgtttgaaagtggaaatgattgtgattattaagaagctaaacgttttcagacagtcaaaacatttgggatttgtgtccctaggttggtgaagcccaactattcctccagacctcaaatatcacagtcccttggaataagatccaggcaggggcatgttcaaagctctttagatgattgagatccactgygcyagattgtaggatcagtgagggcagagactggggccacttttcagtggcactacctgagacctagaagttcagtaaatattcattgacggaatcaatggatattcaattcagaaaygaaggatcaatatggacataaatntgtatctctctgcatttctgatatatactgaaataaaaatgatctattccagacagaagggaatctaaactagatattctgagacaatattcatctctcractctgccttggttttttggtgttgcaggactccttggccctgccaagagggatgcctggctacagttaagggcagagattgaaggtctgacagattcctggctaacaaatgcacttaagtctttatcaattattagcactaggtaagtggaattgttacctttctatgtgtatcgtattgaagatttagttctaattgtacaacatagaaaaaatgttttaattcctagactgttttagactttaagggacctaacaattctgagttcagtgattttttcaatttcagtgcatgtgcatgagagagagagagagagwgtgtgtgtgtgagtgtgtgtgtgtgtgtgtgtgtgtgtgtgtgttgggatgagagaaggttgctgcttctcagaataaacaggagaccctatctcaccacccatctcttctcatagcaactgataatccccacagaatggttacatgacttctaatgaaaaaagaaagagaactcagttggtggcaaagtacaagggggtgatggcaaatatgaaacagtactgttgatacaaaaaggcatgttttaggtgttaggccataatggataatacacataatgtaagcacatcagaaaagcaggagaaagctcttgaaaaaattctaaccattttgttgtttgaactaaacagtgaaattctgacttgtgtcagtatacagagcagaattaaattgatttgtaaccagttgtacaaccaggtgccaaatatgctaattcataaagtgatgtaagtaagtctggaacgtgatagctggtaaggtagagttgaatctctgtactgtccgcttccattattttatatctgagttaggtgaataaataaaagcatgcttaataagtgggagctaaatgatgagaactcatggacacatatagggaaacaacagacactggggcctacttgagggtgaagggtaggaggagggagagaatcagaaagagtaactgttaggtactagacttagtacctgagtgataaaataatctgtatagcaaaaccccgtgacctatatagcaaacatgcacatgtatccctgcacctaaaataaaagtcaaaaaaaaagaatctgtcagcatttccattaagaaaagattagtgggtcaggcgcagtggctcatgcctataatcccagcactttgggaggccgaggcaggtggatcacgaggtcaggagattgagaccaccctagccaacatggtgaaaccccatctctactaaaaatacaaaaaaaaaaaaacaaaattagctggtcgtggtggtgcacacctgtagtcccagctactcgggaggctgaggcaggagagttgcttgaacctgggaggcggaggttacactgagctgagatcatgctactgtactccagcctggagacagagcaagactctgtctcaaaaaaaaaaaaaagtaaagaaaagattaatgagaacgtgcagtatttgcttttttgttcctgtgttagtttgttaaggataatggcctccagctccatccatgtcctggcaaaggacatgatctcattcttctttatggctgcatagtattccatggtgtacatgtaccacattttctttatccagtctatcattgatgcacagttaggttgactccatgtctttgctattgtgaatagtgctgcagtgaacatgtgtgtgcatgtgtctttattataaaatgatttatatgcctttgggtatatacccagtactgggattgctgggttaaatagtagttttgtctttagatctttgaggattcgccacactgccttccacaatggctgaactaatttacactcccaccaaatgccgcatgttctcacttacaagtgagagctaaatgatgagaacatgtggacacatagaggggaacaacacacactggggccttccagagggtggagaatagaaggagggagaggatcagcaaaaagaaaaatgggtattaggcttaatacctggatgatgaaataatctgtacaacaaccccccatgacacaagttaacctatgtaaccaacctgcccttgtacccctgaacttaaaataaaagttggaaaagaaaagatcaatgaataagatgacaaattgttagttttaaaaaaagaagaaaaaagcatgcttaataaatgtatggggaacacagcattcagagaaagatttatttggactaattgaatcagaatgcagaaaagcctgacagggcaaaaaaaaaaaaagttaatattaagaacatgaaagtaaatgaatagttgtcacatcctgcacagcttctgactcgtggcacaggcagagctgcatggatagcagaaagtccaaatggagagcggaggggaagtagcttcctgtgtctgactggggaagccatggcagcttagtttgtcagttctagggaccatattccagtgggggctgtggcagggttgaagcagcctgtgtcaagtgtggyagtcacgggtttggactgtgggaaccacctaaaagaaacagatggaaggaggagccagagagcttagtcagaagagtcatgtgcagaaccaagattaccaatttcacctgtttcagacgttaggctgaaaatcaattagatttctccctgtgtctggaaaggaaagaactgggaccaatgagtaggaatcctgcaagggagattctggctctatataaggaagaaatgtctaaaccagttgaaatgggacttgctatctcatgtcctctgtaattggtgacaagagagaccaaatgtcagggacgctggagcacgaggacccctgagccactgacatgatgtgtaaaatgtagtggagtgtgcatttctctgagaaggaggttgatagctttcattatttctaaaagatgtcttctatataagttaaaaaagatgattacattattagattatatatwctatataatatatacagattaattattaaacagatggctttaaggcaactaaaggaatatgtgatattccagaaataaataaagatataacaaggaagggaggagaaaaagaaatcaacatacattgagtagttacatgctatggaatttgctgagttatccacatatattaccatattgatacaattgcagttttgccattacttttaatggcaaaaaacaaaattgcttttgcaccaacccaatagttttcacaaaatgcctggaatgtcagaaaaacagatgctttgttgaattatgtagtagaacccctagcaaaattaacttaccctctgaccctaattattctgtgaatatagtctcagaataacgaaagatgtaagaatatattttggtagcattacttgtaatatttagaaatcaaaagccacttaagcaactcaatttaactctaaaaaattctggtgcatcccacaccacacctattccaaaattgaccacatacttggaagtaaagctctcctcagcaaatgtaaaagaacagaaattataacagactatctctcagaccacagtgcaatcaaactagaactcaggattaagaatctcactcgaaaccgctcaactacatggaaactgaacaacctgctcctgaatgactactgggtacataacgaaatgaaggcagaaataaagatgttctttgaaaccaacgagaacaaagacacaacataccagaatctctgggacgcattcaaagcagtgtgtagagggaaatttatagcactaaatgcccacaagagaaagcaggaaagatccaaaattgacaccctaacatcgcaattaaaagaactagaaaagcaagagcaaacacattcaaaagctagcagaaggcaagaaataactaaaatcagagcagaactgaaggaaatagagacacaaaaaaaccttcaaaaaattaatgaatccaggagctggttttttgaaaggatcaacaaaattgatagaccgctagcaagactaataaagaaaaaaagagagaagaatcaaatagacgcaataaaaaatgataaaggggatatcaccaccaatcccacagaaatacaaactaccatcagaatactacaaacacctctacgcaaataaactagaaaatctagaagaaatggatacattcctcgacacatacactctcccaagactaaaccaggaagaagttgaatctctgaatagaccaataacaggatctgaaattgtggcaataatccatagcttaccaaccaaaaagagtccaggaccagatggattcacagccgaattctaccagaggtacaaggaggaactggtaccattccttctgaaactattccaatcaatagaaaaagagggaatcctctctaactcattttatgaggccagcatcattctgataccaaagccaggcagagacacaacaaaaaaagagaattttagaccaatatccttgatgaacattgatgcaaaaatcctcaataaaatactggcaaaacgaatccagcagcacatcaaaaagcttatccaccatgatcaaatgggcttcatccctgggatgcaaggctggttcaatatatgcaaatcaataaatgtaatccagcatataaacagagccaaagacaaaaaccacatgattatctcaatagatgcagaaaaagcctttgacaaaattcaacaacccttcatgctaaaaactctcaattgatgggacgtatttcaaaataataagagctatctatgacaaacccacagccaatatcatactgaatgggcaaaaactggaagcgttccctttgaaaactggcacaagacagggatgccctctctcaccactcctattcaacatagtgttggaagttctggccagggcaattaggcaggagaaagaaagaaagggtattcaattaggaaaagaggaagtcaaattgtccctctttgcagacgacatgattgtatatctagaaaaccccattgtctcagcccaaaatctccttaagctgataagcaacttcagcaaagtctcaggatacaaaatcaatgtacaaaaatcacaagcattcttatacaccaacaacagacaaacagagagccaaatcatgagtgaactcccattcacaattgcttcaaagagaataaaatacctaggaatccaacttacaagggatgtgaaggacctcttcaaggagaactacaaamcactgctcaaggaaataaaagaggatacaaacaaatggaagaacattccatgctcatgggtaggaagaatcaatatcgtgaaaatggccatactgcccaaggtaatttacagattcaatgccatccccatcaagctaccaatgcctttcttcacagaattggaaaaaactactttaaagttcatatggaaccaaaaaagagcccgcatcgccaagtcaatcctaagccaaaagaacaaagctggaggcatcacactacctgacttcaaactatactacaaggctacagtaaccaaaacagcgatatagatcaaaggaacagaacagcgccctcagaaataacaccgcctatctacaactatctgatctttgacaaacctgagaaaaacaagcaatggggaaaggattccctatttaataaatggtgctgggacaactggctagccaaatgtagaaagctgaaactggatcccttccttacaccttatacaaaaatcaattcaagatggattaaagacttaaatgttagacctaaaactataaaaaccctagaagaaaacctaggcattaccattcaggacataggcatgggcaaggacttcatgtctaaaacaccaaaagcaatggcaacaaaagacaaaattgacaaatgggatctaattaaactaaagagcttctgcacagcaaaagaaactaccatcagagtgaacaggcaactgacaaaatgggagaaaattttcgcaacctactcatctgacaaagggctgatatccagaatctacaatgaactcaaacaaatttacaagaaaaaaacaaacaaccccatcaaaaagtgggcgaaggacatgaacagacacttctctaaagaagacatttatgcagccaaaaaacacatgaaaaaatgctcatcatcactggccatcagagaaatgcaaatcaaaaccacaatgagataccatctcacaccagttagaatggcaatcattaaaaagtcaggaaacaacaggtgctggagaggatgtggagaaataggaacacttttacactgttagtgggactgtaaactagttcaaccattgtggaagtcagtgykgcgattcctcagggatctagaactggaaataccatttgacccagccatcccattactgggtatatacccaaaggactataaatcatgctgctataaagacacatgcacacgtatgtttattgcggcattattcacaatagcaaagacttggaaccaacccaaatgtccaacaatgatagactggattaagaaaatgtggcacatatacaccatggaatactatgcagccataaaaaatgatgagttcatgtcctttgtagggacatggatgaaattggaaatcatcattctcagtaaactatcgcaagaacaaaaaaccaaacactgcatattctcactcataggtggaaattgaacaatgagatcacatggacacaggaaggggaatatcacactctggggactgttgtggggtggggggaggggggagggatagcattgggagatatacctaatgctagatgacgagttagtgggtgcagcgcaccagcatggcacatgtatgcatatgtaactaacctgcacaatgtgcacatgtaccctaaaacttaaagtataataataaaaaaaaaaaggaaaaaaaaaaattctggtgcatctacatggtagagtagtttttttttttttttaattatactttaagttctagggtacatgtgcacaacgtgcaggcttgttacatatgtatacatgtgccatgttggtgtgctgcctatttgtttatatctattaactattattcccacctcccaacaaaacaatgtataaaaactactctaccgtgtagagtatatacatgtataaaactactctaccgtgtatgtactctacattgttttgttgggagaggggaataatagttaatagatataaacaagtaggctcatgatataaatacataaagtagaatacaaaattgaatatacagaatgttcccaatgggaaaacaaaatctgtatatgaacagaaacactgaaagtaaatgcatgaaatggagaaagcagttttctccagatggttaaataatagttaatgttttttgttttcttctttatatttgtcttttacaaattttcctgttacaagtatatacagtgtttgtaatttaaaaagaaatgtaactctgaatatcacacagtgcaagtcacaaaagttcatatccaaaccacatctcgaaactttaaaagcctgtgctttatttcattctaccatgttttcattctgtaacattttgtaacatttgcctacgtatgacttttaatagcatattgttttgacgaaatattttgtagaactttaagcatcacagtatagtcatgggtttgtatmttcttcttaataatctgccattattggaggagtgtctgtctgctgataggcaatagtaatgaattttgaaagggaccattaattaaggaatttagagaccacagtgacaattttaaatmtattagaagttatttagtattagaaaacaaacatgtatatttcctccctattttaggagtaactgcataaatgtcttggtaacgacaactcaactgatcccrgcacttgcgaaggttctactctatagtttaggaggtgctttccccattgagaatatttacagtgcaactaaaataggtaaggaaattattttaaactctstatggaatgtgtccacatctgtgtgtctctgcctagttccctttttcagcaatttcacttagtacatgaaacaaatttggataaagttcaaattacaaagtcccctacaactcattgtacatgtatgaattttttgagaactgttgcctagtgacattaagaactcagtatctsagtatagatatttcattcttgtatttcacagaatattacagcccatgttatctaaataatatgtaatacctctagccatagtatttaatagtttaattagtttggcttataatgttgcatccttgcatatgcagtaatctagatccaagataaaaatacaattttggctttgcaggggattctttgatggattgaacgagtgcccttaattacagaaaaaaattaagagttttatgtatcagaaaacataataggaatattcataacacatgagcgactggaaatctgcatttccaaaaatgtgcagtagcaatcaaagaaccacaaccttgtttatttagatgatatctgcttgtggagccatctttgatttttaagtgcatttctcgcagactccaacttctaataaacattcaaaagcaaaacttcatcaacttctgccttattgaaagacttaaaactgatgtattccactgtctgtcaaggaaatacttgggaaaataaatgggttgtgtaatatgccttgaaggtcaacaaacttaggctctggcacattgacaagagaagttcaaaatcctaaaatcccccaccaaaaataacctgccctgggctttgaggaggtctgatgttggccctggcaaaaggagcctccagtggcagctgtttcaagagtacagttaaggagagccaagcttccgtagagtaaatttcacattgtcataagcactacagttcagagcctggatatcaataccatacatttttaatctaaatgtgtgtatttatgtcagcaggactaatagaaagaaggtaattttgcttttttgatgaatcaaataattttayagcagaataaacatttattttagtaaagacaatattctttctgttggcgaaatagttccttatattctttaatctgaaacaaaatcatttttattttttccattaagctagtattttttggacttctgaaccatcagattaagaaaaaaggcagaagtagccatggctgcatgaacattctgggagtgaaatttagagaataatgccaatgttttaaaaacaaagaatatgtagaaattccacggtgatgttcccgtagtgcaataagaggataccagtgttgtcagtactgtggcccagtcagacagcacccttagcagaagttatttgagcaggctaactctcacccacttgaagaaaggtgttgtttatcaagataaattcacttcttagtatttcctctttttttagcggtgaaccttcagtttttctctagaacacatttagctgacttgtctatgctacttaaaattgatttacagaattaaacaaaggttaaaacttatagttgcttgtaaagttaccccaatactctgttggtggagaaaaacatactaatattttctctaggtcaaatgcttatccctactgatgtttttggagtgtgaaacacatttgtttaatcatctgtccgaagtaacgccttaccttattcaaatatatgttgatttcataaacccagaggttgtgagccagttcaagtgatgttcaagaggcattaacttaacactttatgaatctttaggttaatgaatgcagtggctggaagaataagcagtgcattgtttttcaggcaaggaaagctgttttgagcgtatagtgtccagatttggcactaacataacttatgttgtgattggagatggccgagatgaggagcatgccgctaaccaggtaacttcactctgaactttatctcatttatcttccaggaaaagaaagttgctttgaaygaataatgcaaaggtttggcagaaaagtagtgtatgttgtaattggggatggtgtagaagaagaacaggcagcaaaaaaggtaacctgtctcaaacaatgtcggtgtgatacttctaatgcaagcctttttgtttgcatttctgtagtttggcccaatggcagcttgacaaatgatttaaatttatagatgcaaagcaataagagcatgagagggtcaatacttacattcaaataaaccatttggagtttagcattttttgcctgaaatttgataggaaatgcagggaaatttagttatatttatttatgtgtttgaaagtatatacatatagtaaatatatatagtaacatatatatttgtgtgggcatgtatacacatgcttatatagatgcatatgtatatattaatacacatacaatgtgcacagatatagatgagccaggggatctgcaagaaagattgggggggagaataaccattgttaagcacatgaaatttagcaagatagagattaatgagctccatacaaaagtcatgtgagtagttcatgagacctgcatgccatatggtcctcgtgagtgcctggaagtaggcatgctccatgataaggaatgctgagggcagatttaatagctgaagaaaaactgctacaagagattttaataagtgctactgaaatgggatgtattgctcagatccttttgcaccaacttgtcttagccgtaatgtgcctcacatctcctagaagagtttcatctgttttggtgagccagtggtacttgattgaagccaagcagctggctttgaacacattcagaagatcccatgggccctaagtattttaataagccttttcatctggcccgtatttctgaagaagaaaccaaggcaattaaaaaccattaaatggttggttcaacatcaaaagaagaatgatatcaggattggcccccaccaccagactgtcaactccaccctaagatctactgctgccttcaccgaatgatagaaaaatatcatctacccaagataaaagtgatagaatttacaaaacaaagccagatgatgaattagtatttttaaaacaatgacatgccagcctatactgttttacatagaaagaatgtcatctgtatcaccctaaggagattttaaatcatcatctaataaagcctttgccatttgcatgtgctggaatgtttacctgttttcaaaaaacagtcaacatagacagttttatagaaaagtttatggctataagagaaagagaaaggaaatgatgtatgtttctagtcgatttaaatcaagcaaaatggagaaaaggaaagcacttccactttagaagttttggtgacgtattggcagccatacttgcttttcgattacatttaagagagtaggctcaggctctgcctgccacagaacacctcagccttcattagcagtgtcaatgacccaagacagcacactagccccaagcacgtcctgtatgaggtcagggctgcagcctcaagaaatacggctttcattgctgactactacttcaaatgcttccagtcacrctgaactgaaatatcttctggagtttgtcaatgtcctgagtccatgttgtgatttttcttattggcaccatagttatacacaacaaagagcagccaatgattagtaatacagccccactcctgctaaatttacatgtcttttagcctatgcaaattaaattcacgtatatttaggtaaggactaatataattcagttttccaaaccagtaacacaatatgcttttgacaattaaaacttagccgagtctacctgttttccacagcattaatgtttagattcggtttaccagttgttatacctaaaacttcaggagggaaacgcataaccctgaatggaaaacaatctcagatagaatgctatttccaaatggttgtttatgtaggtacagttttggtgatggtgaaggcttattattctattttaaaacagaggtgattggtttctctagtacccagaatgcatgcttttctttggatgtagcggtaatcgcatgtgcagaaatgttaagtactgttttgttgttacaaatagatctgagctgaatgaaaaaatgttacttctatgtgaatttcagtgacttaatttgacctagacatattttgtctgagaaatttaagaagaaatatcaaagtttaggaataggaatgtctagctgcgctcttccatagaaacatgtaatattaatacaagctgtatatgtagtttgaaattttctagaagctacattttacaaaattaaagagaaacaggtagaattaattttaataacatgtcaacccagtatacccaaaataattgtcttgatatctaattaatgtaaaaattattgaagtcatgtttacattcttttttgtttgtttgttttgtcctaagtctttgaaattcattgtgtattttaaactggaccaaccacatttcaagtgctcaatagccacatgtggctggtggctaccatagtgtgcagcaaggaattatatagcaataaggattattatgctacttagttcttaaataaaatatcttttgcatgttttatatctatatactcatttcccttatatacatgaatattttatacgtacatattctagaagatgtcatcagcccaaacttaacaaatcatgcttttgttttgtcagttcctgtaatgcagtgttttttctttttcattatcatcgccagtggggactctttagacagtttttttctaattactccctttcatgaaattttaatgtcacatatgtactgtatactattatagtatatcttttgaaggccacaaaccactgtaatgtctaagattttctgccccacaagagctcatttgtgtccctttggagatatcttccccattgaaaatgtatgctagagtactttctctcaattctacgccagtgaaataaatcaggtcgactctactggcttaagttattggttgtcccagacaagtaagaaagttataatccccaccttttttttctactttatgtagtcctgcttcaaattatttttatacagaaaggaattcaccctcttttcttcctagattaacaaaattaagaagtttgtcattttgtttcattttatttttaattgagaggcccgtaggagtgatgcactgattaaaacttgctttccattagccaggtaggattttgatgcccacttgctttcccagatgttgatgttggtagcgatacttccagaataaatattaaactatctaagaaatgttaatatttgctattattctcattaaaatccagttcagatctatttctctgttactttgacagtgccatattggtgctgccaagccttcacatatgatcatcccgcctttaaactctctcccctgaacttgggtggaccacacatccctgtgtgtgctgctgcttcattgagacratggttgtgatctctctccatgcctcattccttccccttctctctcccatccctccttctcctaaccacacagcacaacatgcccttctggaggatatccagtcactcagacctcctggctctccaccaagcactggaattagagtatttgtaactgtgttctttagccggagatcyattttttatatttcaagtacactgaatttttatgtgtgattcaatgcctctggctctacacatataaattgtcttaatggatgaaatcatatttggaataaaaattccagaatgaagaattcagattgctgaatggagttaaactttagtgctacagaaaagaaactctatggtcttatatttacaacactttaatgggttttttaaaaatctgtggaggttgctggtacacaccaaatgagtccaaactggaatgagcagctttagcaaagaactcttacctggcaaagcagcaacacacatgctccgtctgacaaggtggtcaacaacattcctcaaaatgggagatcttctcagccctgaggtttgaatctgactttagcctacctaacccagaaaatctgaattggaatgcactcagactgtataaggacagtcctatttagacatgtaatttgtgtaaattattgatgaaaataatttactgtgactttattagcagctgactttcaaagtggatgcaatttttctttcttttgttggggaggggaatgggaggggaaatgggaatataatattgtctcttttttaagtttggcaaacagaatgttcatactgatgtgttgtgccttaaagacaagacagcatttgtgtgttacaatgtaactttggttaaaatctctgtagataatgaaaaaaaacaaaaaaaaaaacctttgtgatgattcttaacatgaccaaatttaaaagtcaagctctcagagcttaattaccgcatcagcaagaaactgagtattttttgcaataagaaaacaacaataataaaggaaagcttgtgtttcatttgggttcttaataattccaataattgtatgaggcaactatttgcgcatccaaccatgagtggaaggtttgggaaagactgtgggacctttacttagaaagtgaaatgtatgtagaagtctcaagtaccccttctacagttttactggagaaaactaagagccatattcatgacaacttgcacagttttgaggttgagacttttgatatgtgtaagttgcatagaggaggatattatcatgcaaatcatgagcaattatcacataaacttttttagaatgtgccatgaacatggcataaaattcacattgagtgcacagggcttaaaataaagctaagtatgtttattcccaatgccatggcaaaaatgataatatcatcagaaatggaaggcagatctcccagatggtgtctaatgaaagcaatgagtctatgaaaattttacctagaatatcatcataaattaaattagcaagtgcgctggatcttggcagcgctgctgaaatgacaacagtaaaataatacctggttctccatctgaatacatcaatgcaggttctcctcgtgacagacttgcatatgtttgttagtttctgcctgtattgtcactgcgcaacggatggcattcattacaagaagagcccatcatcgttgtgtttgcatggtttttttccttgtgtgtagcccatgttgggaacacgatacaggttctcctcttatttcctatgacacgatttcccttgtggaaatttaagactttaagaactagagtatttttatggtgtctgcacctgcagttctgtgtttaaaatgtcataatgtggatcctggagtcaggctactagtcagtgcccctagccagaggctggttcatgagttcatcaactgaggcctctgtggcttcaataaagtctacattttgctcacagatcacaacattcactgtggaaatatgatttcatttctttaggctacaaacctgtatttctttactgaatgctaaggccatgtttatattgggtagaaagatattgagatcccaattttgtacaagattgtgatttcattatctaaaccttaaacttaatcctttaaattttgtagcttttggctgcatctgccccaagtactattccaggcaaattaaagttggaatacctttaataatataaaaataatgatagtaaatcttatacttctgttggcccttagcttgaaaatagcagttaaaaaaatttaaatgttgccttgattatcagtacttaattatgttgtgcactaaaaccttaaatatttattactgtgaataaaaacaaattatctttactgtatagctggtttctttaaatgttgatagaattgtggcattacatctaaatttgtaagtcttttcatatcaaacaagcaaggctttttatgctgctaagtctgtgggtgcagaaagaaacaccccttggaagggcaaagagaagccggctggttgcatcaccccgtgcagtttctcacacacatctctttttctgattctgtgttcagaagaggctgccggcataaaacctaaatgcaaggttgacggagaacagcttgtctggcacaacaatggtgcaggcccacgagccagcatcacagcttggccatgggacgttgagtatgcacaaactagaactcttcccttcccaccttaggaatagaaaatcctcttcctttctaatctgaaaaacgaaaactgaacaaacacaaaaccaaccccttggcagttcccacctcctattgacatatggaatattgtgccttattgtaaaccagtttgaaaaatgttctgtaactaaagtgggttttcggctattatgtatacagcttggtatattactacgaaagataaccaccttgtgttgcaccttaaaaatatcaagaccatgtaatttccataacaaaataggtggcctggctatggtattatagcatacaattaggacactatgcccctgcaaaattttgtaaatcaaattcagaggcaaaaacatattttagaatcatacagtttgcacacgacaagtaggtaataactgtctctaaaaatgttttctccttagtccgcaatgagctaagattcagaatagtgtcaacagcatgctcctatatgaagttgttttttttaaagcacatttgtttatgacaagcctacattctcagtgaatatggcatttagtatttcttttgaaaacaaacttaagcatcatgagccaaagttgcactttgactcccaactacggtagcattatggacatctcacaatgtcaagggtttctgttatgtattagtaaagtatagattattggggcctacataatttaaaagaaatgtaaattaatattaaaagcttgtaaaaatatgtatatctttactatttctcaataaatacctttgcaattgttttcatttccttcaccctcccatgttgtagagtttttgtgtgtttatttagcttggttctaaatcatgtgaaatttgtatttaggtttctggtcttcataacttttcttttttatgcctaagttgcataatttccagttaaagcaaaatgagatgtaacacagtaaaacgtcactaattatgactaaaagtgagctgctttactgaaaagatgtcagttgcataattttttatacacaggtagctacattcaagtaagtataatgcataatgtagccacaattcactaatgataaagtaattaaaatatttagacctattagaatatttaaagcaagtatcgtttacgtgaatatgggacatagtttataagtatcttccaagaggataaaaaggtagttttctgtaacagatttaatagctcctttattgtctggtgtatagtatttatttatttgtgaatctgttgttcacatgtaaaccaaatgcaaatttcagataaacctctgctcattcacaacctttaaaaatgttagcctccaaattaatggtatttaagtggagctatgtggcaacattctagtaagccttacaccatccaaaaatcaatactgatttacaggaaaacaatggaaatgtttaaaataaatttaatatgtaaacttcttttgttttctcttatatccagttgccattgaaattgaatttatgagaaagactaaattatacatatcgtattccagctccccactgaactccaaacaaatgtatcttgtttgcctatttatatacctgcttggaagaaacgacctctcaaatcaacatgtccaaatctgagcttgtgcttctgcgccggcctcttctcacctctcccacgactaccaccccagctgaaaccagcatcctttctcacatagataagtacatcagcctctagcttagtctcccttctctggccctcacaccctttcaccatctcatcacactagccagaaacataccgtgcatcagaggatatctctctcctcttcttggaaaccaccagctcgcttggcacaaacaccagtgacctttgcaatggcctgtaagcccacaggcagcatccctggtgagctctcccttcctctgtctcacaactcactgccaaactggcacctccgtgtttggcacatacctgcacccacccacctgctgcrggccttttgcactcaccattccttccacttgaaaaggttttcacccagatctttgcatcacctatgccctgggtttcttcagttcttaaagaacacctttttgctgtaaaggtcctcctctctgaaattgcacctgcttcccaacacctctagcattttccttctttactaagaaaaaatacttagttcttagattaatccagcatgatacacatttattttttgtgttgttgattcatccattacaatgtataaacttcaggaaaacacttgcatgagcatgatctagaattgaagagatttaaagtggtagaggaccatgtgtgatggctcattcctataatcccagcactttgggaggccggtgggaggatcacttgagttcaggagttcaggaccagcctgggcaacatagagagaccctgtctctctctctgtctctctttttctaatagccagatgtgatagtgcgtgcctgtagtcccagctactcatggtgccaagacgggaagatcgcatgagcctgggaggtggaggctgcagcgagctgtgatcacgccactgcactctagcctggaagacagagcaagactctgtctcaaaaaaaaaaagaaaagaaaagaaatgatcgagctagatttgaaagggaaaaggagagaagaaaacatacacaggacctgtgtaagtttttataccttagctggagtatttgctggcctaatttatggaaataaagaacaaggatggccataagcaaagatgtaattgaagaaaggttgtatgtgacctgagaatgatcgtctggataaaaaacgtttacaatgaatcagcgattgcctcctttatactccctttttccctttcataaaagaaaaagtatgcaatattagtaggcttaattgacttacattacttaaagccacacacaaacaaacatgtaaaaatcagatctctctgcaaactgtggttcatgattctgagtccctgaaacaaacaacaacaaaaaaaattttaagtgtcggatgttgtttagttaccaaaagagaaccatttattttttgatccagggtcttgctttgttgcccaggctgaagtgcagtggcaccatcatagctcactgtaacctcgaactcctggactcaagcaatcctcctgcctcagactccgaaagtgctgagattacaggtgtgagccactgcacccagactaataaccattatttaacatctctgcatggttttgtatattctttaaaagttattggatgtaattctggcaaagtatgcatgtgtgctaatacacaggtcgctacacaaagcagtctacatttgactgtgccagagtcaattcttgagatatactgcaatcaacaaagatgccctctcagagcctcaaggggaaaatgttcattgtgcccaagttctgactttcaatggaaatagtagccattattccttagcttttccttcatccacagaaccttccaggtctgtgttagcacacagtttgaaagatctccaaatgtaatatgctaaaggatctctgacaatgcatataactccatataagccagatgactattttccctcccaacaaaatgccttttgattgcagcttgcagggacagtgtctctatggctaaagggcaatgcattgtcctttgtggtcatgaaatcttagatttgtgtgccttatgtctgctatgatgctgccattttagttttctggtgagccttcagtgaaaatacatagaattgaaagagggtgtactggaaaaggtagagggaccaccaagtaaatcatcctccacagaaccacagcagagtactgctgaccctaaactcatcacagtcctgacccttaaggttcttatgcttttcaatcggggtgactcttaagataacgaatgaagggtgttagcaggggataagcacaggggcatggtgagtcacttgcagagaaacctaaccagcccttaaagggaagattcttggagaaaatgagtccaaagctgaagccccaaggacaaaaccgagaaggccagagcatttgcaggactggattggaagcatataagcaaagtggaaaatatgtaagagaatgcaggtaagagggagaagggtagaatggtgtagtcagggaactgcaagtaattcttgtttctgaagcatggagtgaataaaaggaatagtaagaaatgagactgaaaaaaaaacaagg

SEQ ID NO: 94957 - DNA, 32481 bp, Homo sapiens
  misc_feature (1)...(32481): n = A,T,C or G
taatatcacagtgtgtaaacattgtgttaacacagtatgttataaatatgagagcaatatttcattaatatcatggtttgtaatcactgagtgtaaatactggatatgataagtattagagtgatatttcattaatataacagtgtgtaaacagtgtgtgcaaacactgatattataaatatcggagcaatattttataaatatcacagtgtgtaaacactggatattttaaatatgagggggatatttcattactattacagtgtgtaaacacttgatgttataaatatcagagtcatatttcattattatcaacgtgtttaaacactgtgtaaacactgatattacaaatatcagagtgacatttctttaatatcacagtgtgtaaacactgaataatataaatatcagagcgatatttcattaatatcaatagtgtgtaaacactgaatattataaatatcacagtgatatttcattaatatcatagtgtgtaaacactgtgtctaaacactggatatgataaatattagagcaagatgtcattaatatcccagtgtgtaaacactgtgtctaaacactgaatattataaatatcagagtgacatttcattaatattttagtgtataagcactggatgttataattatcagagcgatatttcataaacatcacagtgtgtacaccactgccattataaatatcatggcgatattttattactatcacagtgtgtaaacactggatattataaatatcagagccatatttcattactatcacagtgtgtgaatactgaatattatacatctcagagcaatatttcattaatatcacagtgtgtaaacactggatattataaatatcagagccatatttcattaatatcacagtgtgtaaacaccggatattataaatatcagagtgatatttcactcactgaatattataaacatcatcagagagatatttcattaatatcactgtgtgtaaaccctgaatattataaataccatcagagaaatatttcattaatatcacagtgtgtaaacagtggatattgtaaatatcatcacactgatatttcatatatatcactgtgtgtaaacactggatattacaagtatcatcagagtgatattttgttaatatcatagtgtgtcaatattggatattacaagtatcatcagagcaatatttcatgaatactacagtgtgtaaacactggatattacaattattatcatcagagcgatatttcattaatatcacagcgtgtaaaccctggatattacatgtatcctcatcagagcaatattcattaatatcacagtttgtaaaccctggatacaataaatatcagagcgaaatttccctaaaatcacagtgtgtacatcctggatactataaatatcagtgcaaaatttccctagtatcacaatgtgtaaatcctggatactctaaatatgagaccgaaaattccctggtatcacagtgtgtaaaccctggattttataaatatcagagctaaatttccccagtatcacagtgtgtaaaccctggacactataaatatcagaacaaaattttcctagtatcacagtgtgtaaaccctggatactataaatatcagaacaaaattttccttgtatcacagtgtgtaagccctggatactataaatatcagagtcaaattttcctagtatcacagtgtgtaaacactttgtgtaaacactggaaattatatgtatcagactgatatttcactagtgtcacagtgtgtaaaccctgtgtgtaaactctggatattataaatatcagagcgatatttcactaatgttacagtgtgtaaacgctgtatattataaatatcagggtgaaatttcactaatgtctcagtatgtaaatactggatattagtaatatcagagagaaattttactaatgtcgcagtgtataaacactagatattacaaatatcagagcgaaatttcccttgtatcacagtgtgtaaaaagtggacactataaatatcagaccgaaatttccctagtattactgtgtgtaaacactggatactataagtatcagagcggtatttcactagtatcacagcgtgtaaacactttgtgtaaacactggatattatacatatcagaatgatatttcaccagtattacagtgtgtaaccactggagatgataattatcagggtgatatttcactagtatcacagtgtgtaaccaccggatattataaatattagagcgatatttctttaatatcacagcatgtaagccctgtgtgtaaacactggatattataaatatcacagcgatatttcgctgatatcacagtgtgtaaccactgggtattgtaaatatcacagtgatgtttcaccaatatcacaacgtgttactagtggatattggaaatatcacagcgatgttttgccaatatcacagtgtgtaaccactggaaattgtaaatatcacagtgatatttcgccgatatcacagtgtgtaaccagtgtgtaatcacaggatattgtaaatatcagagcaatattttgctggtatcacagtgtgtaaacttgatactgtaaatatcacagcaatatttcactgatattacagtgtgtaaacactggatattgtaaatatcacagcgatatttcactgatatcacagtgtataaactctggatgttgtcaatatcacagtgatatttcactaatatcagagtgtgtaaacacaggatatcgtaaatatcacagcaatatttcagtgatgtcacagtgtgtaagcactgtgtgtaaacactggatattatgaatatcacagcgatatttcattagtatcacggtgtgtaaacactggatattataaatataacaccgatatttccttaatatcatgatgtgtaaacactagatattataaatattgcatcgatatttcattaatatcatggcgtgtaaacactatgtgtgaacactggatattagaaatatcacaacatttcattaatatcacggtgtgcaaacactgtgtgtaaacaatggatattatgaaaatcacagcgatatttcattaatgtcacagtgtgtaagcactgtgtgcaaacactggatattatgaatatcatagcgatattttattaatatcgcagtgtgtaagcactgtgtggaaacactggatattatgaatatcacagcgatatttcgttaatgtcacagtgcgtaagcactgtgtgtaaatactggatattatgaatatcacagtgatatttcattaacgtaacagcgtgtaagcactgtgtaaacactggatattatgagtgtcacagtgatatttcattaatttcacacgggatattataaaaatcacaacgatatttaacatcatagtgtgtaaacactttgtgtaaacatcgggtattataaatatcacagcgatgtttcatcggtatcacagtttgtaaaccttggatattataaacatcacagcgatatttcatttatatcacgatgtgtaaacactggataytataaatatcacagcgatgtttgcttaatatcacggtgtgtaaacactgtatattacaaatatcacagccatattttattaatatcacggtgtgtacacactggatattataaatatcatattgatatttcattgaggtcatggtgtgtaaacactggatgttgtaaatatctgtgatatttcattgatgttatggtgcatcaacacttgatattacaaatatcacagagacatttcattgatatcacagtgtggaaacactgggtattataaatatcacagcgatattatattaatatcacggtgtgtaaacattgtatattacaaatatcagccatattttattaatatcacagtgtgtaaacactggatattataaatatcacatcgatatttcattgatgtcacggtgtgtaaacactggatgttgtaaatatcacagcgatatttcattaatatttcatttcattaataatttcacaaactgccccactgacctagggccagccacaatattactttcatgggccctagctactttgtttttgtgcaccccttcttccataaaataattttaaagtgaatattttatgactgaattcataaaatgactatcatccaagctggattcattattatatattgcttttattacataccttttcttcttctaatttaaaaagaaattacaattaaaacattttcacaggtccctaaaattactgtgtgtgtcctgtgcctgtaagggagaagtcagccctacactgacccctggattctcagctcgcaccaggctccctcacacacactgttctccagcccctttctgctgtctttgcacaaactttgccctcttccttgaacactctcccttgcctttttcctcatttatgtcctctatcccgcacagagcatcagaatccccttacagcacagatcactgggcctgacacctggcttctgattcagcagttgtgacatgggccccaaagtccaccttttcttttcttttcttttcttttcgtcttttttcttttcttttcttttctcttttctttctttcctttctttctttcttggtttttgttgttgttgttgttgttgttttgttttgttttgtttttgagacagagtttcgcttttttttgcccaggctggagtgcaatggcgcgatctcggcccactgcaaactccgcctcccaggttcaagcgattctcctgcctcagcctcctagtagctgagattacaggcgcctgccactggctaatttttgtttttttagtagagatggggtttcaccatgttggccaagctggtctcaaactcctgaccttaggtgatccacccgacttggcctcccaaagtgctgggattacaggtgtgagccacagcgcctggcccagagtccacatttttaacaggaccaaagtgatcctgattctgctggtctgaggaccacactttgagaactactgctttcaagatgagctgcacttctatttcctctaccaagcctcttctgtctcctaattgggtcacatttctccttcacacgctctagaaggaccaaaggccactgctttatcagtgtgatttttttttttttttttttttgcattaaaaacttcttatcttcttcttcttatttttgagacggtctacctctgtcaggctggagtgcagtggtgctatcacggctcactgcagcttcgacctcctgggctcaagcgatcctcccacctcagcctcttgagtagctgggaccacaggtgtgtgccaccacgcctggctaattttttatttttattttgtagagatggggtttcgccatgttgcccaggctgggctcgaactcctggattcaagtgatcctcccctcttggcctcccaaagtgttggaattacaagcatatgccactgcatccagccctgtgtgattaatttatgtttctaccatttgactgtgagctccacgtgtcttttcgctagctgtgggatctgcacccagtgcatacaggtggtcggtraacaggtgctgacagcagttccaaaaagttgaatgaatcaccttaaccttccagcaacagcgaatgcgagtgtaaaatattatcacctcaccaacactgtattttttttttttttaactcttccagctctaaattccacaactcctcctatacctcttgcttccatagaagcccaaggagcccggcagaaactgctttgagcaaccaggaacacccggccctaagtcccgccccgcgcctctccccacctcaagtcccgcctctggctataagccccgccccgccccgatcccggcctccgatcccagatctcgcaccgccccgccccctgtctccgccccagacaccaccccgcctcgtgctctaagccccgcccctctctctggctttaggccgctcccaagcccagagctgctctgcgcaagcgcgaccgaccgagcagctccgaggagtccgcccggaaacaaacattccccagggcaatgtcacgacttggtcttcccgaggagccagtcaggtaaaggctttccgggccctggcaccccgagcttggtcaggcccggccttgatcgtagcggaggccaccggggccttttggccgggactgattttgcanctcccgccagtccacctgcgagcgccggatgggggagcactcgcctccagcaacccgcagggtccccgaacctttgcactgctctggccaggaacagagccggcttaagccagtatggtttacatacacgctgctccccttcccagccggcttggctgttctgcaatccgcgtctccagagttggaccccaggacccccgacagtggcacagacccgcascaggcagccccggattcaagtcccccggtggctactttcagttgtgaccttgggtctgtcagtttcgtaaactctctgagcctggaggtgaccctgtgatcacttgccgggctgttgtgaggataaaatgagaaacgtcaaaattgagaccatgctcagaacggggtggctgctactgctgttgataccttggtgattattccagcggccagcccctaaagtggacagataacgtttttgcagccttttactttggctggtttgtctggtcagttctgtggtttccgggtggttaaaagccaccagcccacagtttccttttctggaggctggcctgcgtgcatccagatgcactgtgcaatccctgtgccagcattcactgatttttttcaggccatttggtctttgaaatacactgccgttacccaaccacatctkgtgagcaccctgccacctagaaagaggcaaaaaatagcaaatacctcctgcaaacaactgcttatctaatgatggggagatttatgacagtggttaccattccctgagcaccagctgtgtgccagccacagtatatgaactgcatcatttaatcttcttaaatatcctcaagcctgacacaaatgaagatgaaactcagagaagtcatttgtatacacttttttttttttttttttgagacagagtctcactctgccgccctggctacagtgcagtaggcaatctcggctcactgcagcctctgcctcctgggttcaagcgattctcctgcctcaaccttctgagtagctgggattacaggcatgtgccacgatgcccggctaatttttgtatgtttagtagaggtggggttttaccatgttggccaggctggtctcgaactcctgacttcaagtgattcaccttcctcagtctcccaaagtgccgggattacaggcatgagccactgtaccaggcctcctatatacatttgaagccaattctgggtatcttaaatagctgattctgcccactatgcaaagctgccttcccacagaaaaagtaaaatcarctgttccttttctagggctgccataacagagtaccacacactgggtgttttaaaacaatagaaatggtctctcatggctatgaagcctggaagtccaaaatcaaggtatcggcagggcctcactcccttagaaggctctgggggtgacctttccttgcctcttccagtttctggtggtttctggcattccttggctcacagcagcatcacttcaacctctgccgccatcttcacatggtcttcttccctgtgtgcatctctccatgttttttcttcttttattttattttatttttgagtcaggtctcactctgtcacccaggccggagtgcagtggtgcaatcatggctcactgcagccttgaactctggggctcaagtgatcctcccacttccgccttccaagtagctgggaatacagttgcatgccccatgcctaagctaatttatgctttttttttttttcttttgtagagacagggtcttaccatgttgaccaggctggtttcaaactcctgggcccaagcaattctcccgcctcaacctcccagtgttgggattacaggcgtgagccgctgcactgggctcgtttctgcttcttatcaggacaacagtcattggatttagagctcactttaattacatctgaaaagatcctatttctgaataaagtcacactctgaagtttggggtagacatgaatttcaggggtgaggggatactgttcaacccactatacaaactagcagtagaacacacctgtcaaaaggaccaaaacaagtccacataggaagggcaccatttgcggttttaaatccaaatgcttgcatattattgggaaattgttctcagaatgtgttcccctgtccacagcgtcagtaacgctgtcatgagggagtttgatacaaatgctaattctcaggccctacaccagagttactgagtcacagtctgggactgaacctcgcagtctatgtgacagccagcgctccaggtgattctgttgctgctaaagcttgggaaccactattataagcagttgaagacataagagtttgagaacataagggccagcttaacagaaggtagtcttctaaccttctaaccttaacaatgactttttcatcaaacctgtcttctctgaatataattatgggtttcaaaattcaacygttgcattattgaaaaaacattttaccatactttatgtttcaaagagaacctgtgtactaaactgtgtgcttagaaggtttttytgtcattttcatcttgcgaacaaccacgcaatttagatagtaycatttctgtcgtgttattgaaaaatacacagagagtcagaaatggcaaactcctaaatacacaacaaagcagaaacagaggcaggactataagctttttaccataactctgcttgctaaaatgtctgtctggtttgtttttattttagaaacagtttgctagatgatgctaaggcccgcttaagaaagtatgatattggaggcaaatattctcacttgccatataacaaatactccgtccttttgccattggtggctaaagaaggaaaactccatttgttgttcaccgtccggtcagagaaggtaggtggacaaaaaatttcctgcccttaaacctcaggacatcagaagacctcacgagattttgtcacttgcacacactttgatgccaaaattctcaaaagggctttcaaaattgtgatgtcagaggcatacaaccacaagccacaggataacatggtgtttcttggagaaggtttaacaagaaaatgaaggaatttagctagcaagcagtttaaaacgctttcacactagggttacctaaccttggtgctattggcatttggggctgaataattctttggtgtggaggctgtcctgtataatgtggtgtgtttaccatcatccttggcctctacccaccagatgccagtagcacacacaaacacaagctcacacacacctttgtccctttgtccagtatgccagtagcacacacaccacaaatgtcttcagaattgcctactatcctggcaggattgggggtgccaaattgccccccaccaagggccactgttttagactatcccacccccagtataatgtgaaaatactagagcatagaagttaacggcctaggctctaaagctagctgtccacgttgaatccaggctctctccttgccagctgtgactttggcctcgttacttgccctctctgtacttcagtcttttcacttgtaaaatgaggacaaaatatyagtaactgcttcatacagctgctatgaacatttcacagggtaacaaatgtaaagcacctatataacccaggtacttggcaaggaagaattcagtaagttttagctgtcatcgttagtgtcaagtgacctgtcagacatgacctgaagttttaagataaatgatgtcactttacagaaataatgggctgggaatggagtttctggctcaccccttgtattggtccattcttgcattgctataacgaaatacctgaggcygggtatggtggctcamgcmtgtaatcccagcactttgagaggccaaggtgggaggatcacgaggtcagcagttcgagamaagcctgaccaacatagtgaaaccccatctctactaaaaatacaaaagaattagccaggcatggtggcacacacctgtaatcccagctactcaggaggctgaggcaggagaaacacttgaaaccaggaggcggaggttgcagtgagccgagattgtgccactgcgctccagcctgaggaacagcgagactccatctcaaaaaaagaaagaaagaaagaaaaagaaatatctgagtctgggtaatttataaagaaaagaggtttcattgastcatggttctgcaggctgtacaggaagcatgacacaggcatctgctcagtttctggaaaggcctcagggagtktaccatcatggcagagggggagcaggagcaagagagagagsagggaaataccacacacttttaaatggccccggatctcatgagaactcactcactatcatggggacagtgccaagatgatggtgctaaaccatgcgtgagaaatctgcccctgtgatccagtcacctccmaccagaccccacctccaacactggggactccagttcaacatgagatttgggcaaggacaaatatcgaaactctaccacccccacacccrtgagcacagtcagtttcccttgctgtggggaacttccaaggaaaagctggtgaagcagtcattttaagcttatccaagtacaaaaagaaaataagccatattaacaggctttttaagcagaataatgaaaagtattttgtttaaaaaaaaaatgccaaggaatcagctggagttttgtggacgtggaagtagacttgtgtggattgtgttcggtctgagccaggcagaaatgccgtgaactcaggacatgatagaaatccaggttccarggggaaatacttaaatggaaaccaggggaccagtgtctgttcccacctctgccaataagcacagragaagcacttacatatattttttaaaattatcagatatggccgtgtgcggtggctcacgcctgtaatcccagcactttgggaggctgargtgggcggatcacctgaggtcaggagttcgagaccagtctggccaacatggcgaaaccctgtctctactaaaaatacaaaaaattagccaggcgtggtggtgggtgcctgtaatcccagctactggggaggctgaggcagggagaatcacttgaacctgggaggtggaggttgcattgagccgagatcgtgccactgcactccagcctgggcaacagagcaagactccatctcaataatgaataaataaataaaaataaataaataaataaaagagaattgtctaacaaacaataatataggaaatctagacaatactacaaactcaaccaacggggtctctagtttcttttgtttcacccagagccacttttgcctgttgattattaaggtcactttttaaaaactatttaaatttaattcaatctgattgtaaacactatctggctgtaggggtgagaaattccctctggagctctactggagctctgcccctcacacaagcagggsgctggtaggagatttccccccagtggatggggaaagcaaggcaagaagtgggttaacccttctcaaatgtgcaatctcccactagctctggaacctcgaacaagtttttcttttttttcagaaggattctcgctctgtcgcccaggctggagtgcagtggcgtgatctcagctcactgcaacctccgcctcttgggttcaagcaattctcccacctcagcctcccaattagctgggattacaggtgcacgccaccacgcctggctaatttttgtatttttagtagagagggagtttcaccatgttggttggccaggctgatcttgacctcctgatctcaggtgatctgcccatcttggcctcccaaagtgctgagatgacaagcgtgtgccaccacgcccagcctgcaaagttcgtaaatctcttaatcacctcggttttctcatccctaaaatgggcctgaaaacagcgcctcatgtgcaaggttgttctgagcctgaaagagatctgtaaaacgcccagcacggctgctggcatgccatagtgctgcatgctgttggatgctacctatgttttcgttatctccttgtccgggtccaccttggataagggactcctctcagaaccctagatccctggtgcccagcaaagagctggcaaacccctttctccattgcacacctgggcacagcccttcaggccttcaaagccacccactttatagttttcaggaattagctgctctgcattatcggtcctgctcttctcccccacacccttgacctcgcatccctcctctgtcccctcttctaccctcctccaccctcctccctgcaccccattctctgggactggaagtaggcaagagaaaattcaggaacaaagcaaagattgaagtcttaggaaattaggctgcagctttacttggcctctgagtagcatttcagaaggttttattgaataagaaatgtatactatttatcaaaaaaataactgaccgcttttgtgcttagagccctttgcagtgctaatagtttttgattagtcagttttagaaatgtgcctgttttcttcaaaacagcgtaatattttcttttttaaaaacaaaattaaatagatttatctttttagatttaaatagatttaacttgtagagatttatcctgtacaatatgatgctttgaagtatatattcactgtggaatgactaaatctagctaattaatttactacctcacatcatagtaacatactacttcacatagtaacatatcaccacacacaatacctcacatagtaacatattactatacatattacctcacatagtaacatatcaccatatacatcatatagtaacatgtcatcatacatattttcttcaaaatagcatattttctttaaaaaaaaatttaggccaggcatggctcacacctgtaatcccagcattttgagaggccaaggtgtggggatcacctgaggtcaggagtttgagaccagcctggccaacatggtgaaaccccatctctactaaaaatgcaaaattagctgggtgtggtggtgcacacctgtagttccagctactcgcgaggctgaggcaggagaatcgcttgaacctagaaggcagaggttgcagkgaaccgagattatcccactgcactccagcctgggcaacagagcgagactctatctcaataaataaataaataaataaattttaaatcaacagataaaattgtatagatttatcctgtacaacatgatgttttgaagtatatattcactatggaatgactaaatctagctaatcaatgtactaactcacatagtaacatattaccacacacattacctcacatagtaacatattaacacatatactacctcatatggtaacatatcaccacacacattacctcacatagtaacatattaacacacatacctcatatggtaacatgtcaccacacataacatactatctcacatagtcatcatctttgcactaagaacactttatatccattcagcaattttcaagaatacagtatgttaactatagttaccatagtatacaatacatctcttgaatttattcctcctgactggctgaaactttttatcttttgaccaacatctccccaacctccccccaaaccacctcagcagctagtaaccaccattctactctctacttctctgagactgactttttaatattccacatatgaatgagatcatgtggcatctgtgactggcttattttacctaacataatttcctccaggttcatccatgttgtcacaaatgacaggatttccttcttttttatgactgaataatattcctctctgtatatacattttcttcattcacttgttgatggatactcaggttgattccatgtcttggccattgtgaacaatgctgcagtaaacatgggtgtgcagagacctcttcgatatactgatttcatttcctttggatatataaccagtagtgggattgctggatcatatggcaattctgtttttaattttttgagaaacctccattctgttttccacaatgattgtactaatttacattcccaccaagagtgtgtgatagttcccttttttccatatcctcaacaacacttacgttttgttttttagataatggccattctaaaaggtgtgasgtaatgtctctctgtggttttaatttgaattttcctggtgattagtgatgttaagcatttttttcatataccttttgagaaatgtctatttagttcctttgtccatttttaaatttttttttattattgatattgagttgagttccttatatattttggatactagccccttttcagatgtatggtttgcaaatattttctcccattccacagattgtcttttcattctgttgagtgtttccttagctgtgcaaaagctttttagttgaagtaaccccatgttttatttttgctttcattgcctgtgcttttggggtcatattttaaaaatcattgcccagcycaaggataacattttcttgagagcaatgttctcactaatccaaaatgatcttttccaattcctattacctattaattggaataggtgtacaaggcaaattgaataaaattggtatgctatgagatacttttgaaacctttcaaaatacagtcatgtgctgcaaaactgtttttccatcaatgatggaccatggaccatatatacaatggtggccccaaaagatgataatggagctgaaaattcctatcaccaactgacatcatagcagtcataatgtcatagcacaagacattactcacatgtttgtggtgatgctggtgtaaacaaacctactgtgttgccagtggtctaaaagtgtagcacatacaattatgcacaatatataatacttgataatgataaaaaatgacatttctggtttatgaaatttactacactattcttttaaatcattattttagagtgttcttcttctacttattttttaaaaataactataaagcagccttagtaaggtccttcaggagatattccaaaaaacacaggcattgttattgtaggagatgagagctccatgtatgttattgttgcccctgaagaccttccagtgggacaagaggtagaggtagaagacagtgatattgattattctgtgtgttgtatcttagtttttagcaagaaagtttaaaaagaaaaaaaaatccttaaaaatagaaaaaagcttctagaataaggatataatgaaaatattttgtatagctgtgtaatgtatttgtgttttaagctaagtgttattacaaaagagtcaaaaaattaaaaattaaaaagtttagaaagtaagaagtaatagtaagctacagttaatttattatttaaaaaagaaaaaggccggggggtggtggcttatacctgtaatcccagcactttgggaggccaaggtggagggaaccatctgaggtcaggagttcgagaccagcctggccaacatggccaaacctcatctctactaaaaatacaaaaattagccaggcatgctggcgggtgcctgtaattccagttacttgggaggctgaggcaggagaatcacttgaactcaggaggcagaggctgcagtgagctgagatcccatcactgcactccagcctggtcgacagacgagaacacgtctcaaaaaaaaaaaagaaaaagaaaaatatttttataaacatactatagcctaagtgtctagtatttatgaagtctagagcagtgtttaatgtcctaagccttcacatccactcaccacccactcattcactgactcacacagagcagctttcagtcctgcaagctccatttatggtaaatgccccatactggtgaaccatttttgatcttttataccatatttttactgtaccttttccgtgtttagatgcacaaatacttaccattatgttactattgcctgcaatatccaggacagtaaaatggtatacaggttgtaacccagaagcagtagctacaccatatagcctaggtttatagtagtctatattatccaggtttgtgcaagtgcaccctgtgttgtttacacgatgatgaartcgcctaatgcatttttcagaacgtgtccctgttgttgagtaacacgtgactgtacatttaaaacaggcatcatatcaggtctgtttctgtcaagcctgatgactgcttggaggtgcgtttgtccctggctgccttggagttgaacgttctaacaataaagcactgtttcagagttgctgtaacattaggtgtatttcttacgcatttggtragacatatttgcagtcgctggtgagtgttcaagacagtagaaatatgtccatcagccttcttttcacctgtttttacaactgtaattgatgtgaagatgtctaaggatttagctatggcagcaatttctgcagtgttcctgatttatcagcacagaaggacttaaaaaaaaatttttaagtcttgcccaaatgaggctgaagcctataaaatatcaaaaagtttatcatggcattgtcatagtcctctcaagctgctataacaaaacaccttagactgggtggcttataaacaacagatactaattctcacagttctggaggctgggaagtccaagatcaagctgccagaagatttggagtctggtgagggccctgtttcagttcatagatagtcatcctttcagtgtccttacagggaaaggggcaaagagtctgtctctggtctcttttataagggcattcatctcattgatgagggctctgcccccatgacctaaacacctcccaaagatcccacctcctaataccatcaccttaggggtaaggatttcaacatatggattcatgggagaataaacattcaggccattgcaggcatctagtttatccttacatagatatatggcctaggtgctaaaaatggcaacatgatctcttgattgagcttctcaatgtycaggactgaccttacaagttctcattattaaatatttaatgtggccacgcaccattcccgtgcatccgctccatcctcatggaacaatcttcacagctctgtgaggagcacactgtcattaccccattgcacacagttggaaagaggcagacccaggactcttgctgagcctgagggctccttgacaattcaggagagaaaggatagtgggtactaggcacaagtgggcataaaagaaattgaggtcactctgctgagatatttggccctgcagaagagagaacagtggagggtttgtgcctctccacttctgcccaagatatgagagaaataattttaaagacagagataagaaagggggtaattttaggatgctatagagacactgtcagttctcctaaaggcaggaaggaatggaatcaaggaagggggcaatgcggggaaagaggagacctcttttcctttaccaacacacgcaaagataaacatagatgccaacacaatgctaatagctccagggcctatattttttgtgtcttactaaacttttgataaatgtgtgttgtactgattaaaaacacaggctcgtaaattaaacactggtttatattccagctcactgagtgaacttggtcaggttatttaacctctgtgagcctaagttcctttgtctgaaaatggaaataataatagtataagagtagcttatggctgggtgyggtggctcacgcctgtaatgccagcactttgggaggccgaggagggcagatcacgaggtcagaakatcgagaccagtctggctaacatggtgaaaccccgtctctactaaaaatacaaaaaattagccgggcatgctggtgggcacctgtagtcccagctactcaggaagctgaggcaggagaatggtgtgaacccaggaggcaaggcttgcagtgagccgagttcgcacactgcactccagcgtgggacacagagcgggactccatgtcaaaaaagaaaagaaaagagtagcttacctgcccatcaatgcatgagtggataaacaaactgtgatctatacacacaatagaatactattcagccataaaaaaggaagtaccaatacacgtagaacatgaagaacctcaaaaacatatgtgaagggaaaaatgccagacacaaaagtcgagactaggtaaatccacagagacagaaagcagggacagagggagaggggaatgagaatcaactgttgtatggggtttccttctgggatgatgaaaatattctggaatgagatagtagggatgattgtacaacacagtaaatgtrttaaacgtctctgctttttttcactttaaaatggttacttttatgtgaatttcacctcgttcaaaaattagtagcttataggactgttctgaggacccagtgggaaaaatctttatgaaacaacatgcccagaacataataagcagccattaaaggactcaacaaaattatctgttgataatattgccccttacattattctttcagctttttccccctagcagtgtcaatctgtgtgtgtgtgatatggtttggatcctgtccccacccaaatctcatgttcagtcgtaaaccccaatattggacctggggcctggtgggaggtgatttgatcacgtgggcggatttcccccttggtactgtcatcacaatagtgagtgagttctcacgagataaggttgtttaaaagtgtgtagcacctcccctccctctctctgtctcccgctccagccatgtgaagtgcttgctcctcctttaccttccgccatgattgtaagtttcctgaggtctccccagaagccaagcagaygccagcatcatgctccctgtacggcctgcgagactgtgagccaaccaaacctcttttctttataaactacccagtctcagttatttatttatagcagtgcaagaacagattaatacagtgtgtggtatcttttggggacaaatagaataaaagttagcagtgagaaaaattttcaaggttcatttcttaaaaaggattcaagaaaacacatttgtgggcaataggggtcttgataccaccacctgggtaagaatggtctctgstacaaaatagaagtycagtaagtatttgttgaatgcataaatagttscaaaattagaatcccacattgtagcgctgttctttctatatccagctaagaagggcccctggagaagtttgcttccctggaggtaagcgtgaccctacagacatggatgatgcagccacagctctccgggaagcccaggaggaagtgggtctccrtcctcaccaagtggaagttgtctgctgcctggtgccatgtcttattgatgtaagggtttcctsagacactcatgagcaccgtccccaccmccaggtggatctactgttctcaggattccacattttccaaacataaccccaaagagtactgtacataaagtcaagagaacaggttctcctacagacattgcccctcatgagtcaagtggctatgggcaaccccttttgcctctccggacccctctttccccatccagaaataaaagggttgaactcccatcagtggatttcaaactggatgccatagaaccctagagagatgcttcagaattattaacattcagttcacatttatttttctccagtatacattggttttgagagttcagttgaaaaaagaacagacactccaatgtgctagataccaaattttagccccttggagaccaccaatgcattacttctgccgtaaggatattcatttttctacatactatagaataaagcctctctgtratacattaattgaatagaaccgtgaaatcactaggcaagctatttaaaaactattactattcataactgcatttgtgttggatcaggatttccttgatagtataatatacatcaaaacatttaaaatatttttaaaaatgaattttggagctgagataaccacatcttattttcttttttatttttttttttatagagatgggggtctcgctatgttgatgaggctggtctcgagctcctggcctcaagtgatcctcccacctcagcctcccaaagtgctgggattacaggtgtgaaccactgtgctcagcttctgatcttactttctatcggttcaccacaacaacctcattgttttactaactgactttagaaggggtaaatattgtattaagaagtatgatcttggataacagcatgattttaccatataaatgttttaataaaacctttaattttaatttcagaatagctgtaggctgatggaaaagtcgtgaaggtagtacagagagttcttatgtagacctagtttccatatgaccacatggaaaccataggaaactagaccataggaaactagaccataggaaactagactataggaaattagaccatagacctagtttcccctgtggttgacatcttacatcactgtgtacatttgtcacaacaaagaaaccagtgtcagcatgttactgttaactgaactccatgctctgtttgctttttactagtttttctactaatgtcctttctgtcctggatctcatctaagataccatattgtattttgtggtcatgtctccttagtcctctggtctgtgatagtttatcagactttcttcttctcatgaccctgacagtttggagatgtagtggtcaggtattttatagaatgttccccaattttggtttgtctgatatttttctcatcgttaagctggggtcataatttgggaacaccacagaggtgaagtgctctcatcacacagtatcagaggtaggtataaacttttcatggttttttttttgttgttgttgttgtttttttgacacaagtctcgctctgtcgcccgggctggagtgcagtggtgcaaactcggctcactgcaagctccgcctcccgggttcacgccattctcctgcctcagcctccccagtagctgggactacaggcgcccatcaccgcgcccggctaattttttgtatttttagtagagacggggtttcaccgtgttagtcaggatggtctcgatctcctgacctcatgatccgcctgcctcagcctcccaaagtgctcggactatagacgtgagccaccacacccagccttaatgttttatatattgggctttcgggtaagtttttatttcaaaagaacagtcccactgttgcctaacacttagaaaaccagtgggttagatgatcctttatgttccacttgactgaagtcttggtggggcagtgttttgaagatcagtgatgctgagacaatgtctgtcttaattgggtcctttttaaaaatagaaaggtcagtacccaagggtggttttgtttgcaaaaagctagtggccactcaataaatgttttctaagtgtgtgtgtatgaaagcgagatggagacatgggattacacacgaaatgtgtcaattacttttccatttggttttctaatgggaactctttacagttgatttccgcaaatccaccagcatttggaggatttactttagaaatcaattaactaatttagctatactgattaaaagtttccaaaatgagactaactctgttcccaaggtccccaggtgctactgagttctgcatgtgggtggatagaattcaggagcattaacaggaaagtgtctctgggagattcctgggggccagatactcctggaacaggagatttctaaaatggcgtgattgagagattaaacaaaggctttaaaaagtctgctttgtttggaagtgcaagggagggttgctttgttttttggcccctgctaatttttaaaatgtatcacaaaaatgccatttattgaaaattataagcataatctaatctacgtggctcttaacctggagtgatttttcaaccctggggaatttggtaatgtctggagatcatagctgggagtggaagggtgctattggcttttctcaagtgatctcgagtcccagtgatctcagctcactgcaacctccacctcccaagttcaagcaattctcctgcctcagcctccagagtagctacctatgtatgtatgcacctatgtatgtacccgctacataagccttccaggcaggctgtgacaccacaacccccaccccagttttcccttttgtcagacatttatgtactactttttgcaaaggtctctgaaatatacccaggagtatgagcaacacatctgtggtcgaatccagtttctgccaagtatcagcagaatatgcccttgggcaagtttcttcacgtctctaattgtagttgttaaggcttcttcgcgatcagattgttgtaaggaatcagagggtgctgggaactagactaggtgcccgtaagttgtggtcaccaatggtagcagcaaccacgaatatttactgagcatacattgttggggctctgtccaggccccttcatattcctcttacaaccccagggcttctgataactcactgttaccagatagggggcctgatccagaccctaagagagggttctaggatctcacagggtgagtccataaagtgaaagcaagtttattagagaagtaaagaaaaaaaagaatggctattccataacagagcaacagcatgtgctgctggttggccatttttatggttatttcttgatcatatgctaaacaaggggtgggttattcatgagttttccaggaaagggatgggcaattcccagaggtgagagttcctcccatttttagaccatgtagggtaacttcctgacattgccgtggcatttgtaatctgtcatggcactrgtgggagtatcttttaacattctaatgctttctaattatcgtataatgagcagtgaggmtgaccagaggttactttcattgccatcttggttttggtgcgttttgatggccttctttactgtaaggtctttatgacttgtatctcagtctcatctggtgactaagcatgccctaacctcctgggaatgcagcccagtagctccaagccttatcttacccagcccctattcaagatggagttgctctggttcaaacgcctctgacaacacttggcagctttcttcygaatactggtacccttgatactggagccaccttgccatgtgtcctgcacagagagctgggagtgcctgtgaattcacctctggcaaggtagtccttaaccagtgactgactggggctggggagcatgaaatcccagctcccttgtctccatgtgggacaaactgcatattaatttaccctccagaacaccccatggtgcccttgccagccttcttcccttatgagtattgctcccctcttccccttaactgtttcccctgggagcactttcttaaaaaatcacttgcatctgagtccttatctcagagtccacctggaaaactccatattcagagactaagcatttccccaatgccaggtgtggtgttacgtgctggtagaatgttgcctctgccctcgggtaacttaatgaccccaaatttcctgccccaaggacatacgaagtctatgttcctcttgtctcctcctggtccaaatgttgactttcactattattttggttaatggtctgagttgtctctgttcctaaatttggtttcctgtctttggctgtccctcagaacattctgcaggccggataggtcccagcctcaccatgtgtctacctctctggctttttccacccacttcctcttgggatgctccaggaattccagttcttctcactttctaatacaaaggcaggcagctcttaccagttcccacatcctcactcagccccaggcctccctctcagggtttccagtataacaaaacagtctttcatttgacarcactcatgttcatttgcttttttacttttatatatttatttttatttttgagactgggcctctctctgtcacccaggctggagtgcagtggcatgatctcggctcactgcaatctatctccgcctcccaagttcaagcaattctcctgcctcagcctcctgagtagctgggattacaggcacgcaccaccacacccggctaatttgtgtatttttagtagagacgggatttcatcatgttggctaggctgstctcaaactcctgacctcaggtggtccgcccacctcagcctcccaaagtgctgggattacaggcgtgagccaccacacccggccactcatgttcatttgcaagcagttgtggttgtaaatagaaatccctctcccatgtaatatatacatgtgtgttatataaagtagttcacatatagttatatataagacacataattatatatatatgtgtatgtactatgaaatttttccataaatgggaatatgtcataactagtattatatcactttacttttctgttcataagtatagcacatttttttctttactgagaaggaaagatgtctatcccattgtttttaaaggctacatagtatcctcttttatggatataaccctaatttatataacctaaatgcctataaagtgaagagtgataactttagaatttggggctgttgttgaaactaattcttcaggtttatacttgtgtcttttcttactggtaggaatttatcatacagatacacaaatgcaattcccaggtcaaagcgaacacatttttatgatactgccaaattgccattccaaaagattgtactactttatgttcatacaagaaatcattttcagagtcatctcatagatgtcacctcaggtagagcaggatgactcccattttagggggaacataaatttgtttccggaataagctttcttccccttctcccaggttcggtgtattttcttagctcacctagaagtggcatgattttaggatttgaagcagtatcacttcacttcttaatttgtctrttttgttttctgcttttagacagatacattgataactccatttgtgggtttaatagaccacaacttccaggcccagccgaatcctgctgaagttaaggatgtattcctggtgcctctggcctatttcctgcatccacaggtccatgaccagcattacgtcacacgtcttggtcaccgttttattaatcatatctttgagtacacaaaccctgragacggtgtcacttaccagatcaagggaatgacggcaaaccttgcagtgttggtggcctttatcattttggaaaaaaaacccacctttgaggttcaatttaatcttaatgatgtattagcatcctctgaagagttattcctgaaggttcataaaaaagctacaagcaggttatgatttactagagcaagagacaaagaactattcacgaggattctgtgtgtgcttattcrtagaacaacaacartgccagctgttggaatttgacaggtgtgaatattttttctgcagtatgtagttagaatccttgcctcttttccagttgccttctattgtctgaaaaagtaaaagccattcaaaaatgaaaactatgttcatagtgttgcatrttttcacccacaatatgttaataatatttttcttacacatataataaagaatatctggcacatactaggcccttaataaagattttttgaatatataaccatgtggcatttaccttatttgcagtaggcaatatatatacacatatataatatacacacacatatacacacacacacacacacacatatatttataatatatatatataatttttttttttttggagagagactcttgctctgtcacccaggctggagtgcggtggcacaatcttggctcagctcactgcaacctccacctcctgggttaagcgattctcctgcctcagactcccaagtaactgggattacaggcgcctgccactacacctggctaatttttgtatttttagtagagatgggtttttgccatgttggccaggctggtctcgaactcctgacctcaggtgatccacttgccttggactcccaaagttctgggattacaggcatgagccaccacacccagctggcaatatatatatttttaatctgttgttacatgtaacagaaacttctggtcatccatcaaaatctatcttccctgtcttctatggtggtagagtttaagctgggtccccagcactccaggtataaacagcattactccggatcccttgcaattcaagttgactctgggacttactttaggccaatgggttatgggtgaaagttgactttccaggtcatctccaatctaagacataagccagtgttcttgagtccctttggttctttttttccatgagctgcaacatggacttctctgcaacccagccttgaccatacaaatgaggacattctctgggggaatggcagaaccgaaagatgtcagagcttgaatcgatgaatgactctgtggagcaaagtaaccttctaacctgggctcttcacttggtactgttacatcagaaaagaataaaattctgtatcatccgtctgccactgtaattcggagtcacttttctatagcagagctaaccaatacgctccagcacctgaaaataactagaatattcatctgaacttgaagtgttgcaagcagttagaaatggggatgatctgacactttatttattttattttatttttttgggacagagactcgctccttcacccaggctggagtgcagtggcgtgatctcggctcaccgcaaccttcacctccagggttcaagcgattctcctgcctcagcctcccaagtagctgggattacaggtgcccaccaccacgcccagctaatttttttgtatttttagtagagatggggtttcactatgttggtcaggctgatctcaaactcttgacctcaggtaatctacccatttcggcctcccaaagtgctgggattacaggcatgagccaccgagcctggccaatctgacaccttacatgtggcttctggggaacacataggatgccctccctgggtgggaggtggggttcagcaatcatccaaaacagctgaaattgaggaatataagaggcttatatgcctaccaattgggagggataatgatgtatgtttcgagatgatgacggcagcaaaatagtgatttaaagcataagccccaaatcaaaagacgaaaagacagacagacattctgtaatgcacccttgagatcttctacttcttatgtgggtatctgcctatatcatgctttagagttagcatggatttttttgtttaattatattcatcatccttcatgaggccagagaggcaagtgagtcaagcaacctaaccacaattctgtgatggcgatttcacatcttattgttgttattagctttttagagagccaaaccatgtttaataagactttgttatagttgaaaatgtgatgcccacaccaaacctatcaatcagccatgtgactgtccattgcggctgagtttttcttttctgagagttggcaaaggcaaatacctgattggctgctttatacccatatatgtttaaatggcagagatctggttccaaccatgaaagcagatgttgggtacgttaccccattaacattctgtaaccagccctgcatgaacaggcctgaactatttccgaacaattacagaagcatttgcaaatgtgtatttacaatctgacagcagtataattgccgggtagatggttgacctctccgacagtgcagaaagcctcccttccaaactgtttgtttatgtgaactctcccagatctgcctggtccagctgaagtcaatctgagcacacccatggccacacaatttatggggctggatgcttagcaaaggaggtattgcccccttccttcttagtggtgtattttatagtatctatgttcagagtcttagttaaatatatctggctcaaataaaataagttattggcaaggtatggatctcagggactctctgaagccactgaataaatcagcttcaagaaggacagcggggcgcagtggctcatgcctgtaatcccaccattcggggaggctgaggcgggtggatcacttgaagtcaggagctcaagaccagcctggccagaatggtgaaatccatctctaccaaaaatacaaaattagccaggtgtggtggtgcacacctgtaatcccagctatttgggaggctgaggcagaattgcttgaacctgggaggcagaggttgcagtgagccgagattgtgccactgtactccagtctactcgacagagtgagactgtgtcaaagaaaaaaaaaaaaggcagtaaggaacaaacacagctaactacctcaaagccagaaggatgtgaaccttttcttttgtatcctgtcattattgctacaagaaacatcttgaattgattgacaccgacatagaaaaacaacagacactcagtgcctcagtccccaattctatctggcctaacatgggtcacctggaaggtttccaggawcccaaaaatatgttcaaaggcaagggctaagtggggactagatggacatcccaaaacatctaatctctccagtccctagattttataaatgctctagattctgccattcagacagctcaactctgtcttctttgcaaccctgcaatcttggtaaagaagtggttaagatggccaggtgcggtggctcacacctgtaatcccagcactttgggaggcctaagccagtggatcacgaggtcaagagatggagaccatcctagccaacatggtgaaatcccatctctactaaaaatacaaaatctagccaggcatggtggcacgcacctgtggtcccagctacttgggaggctgaggcaggagaaatacttgaacccgggaggcagaggttgcagtgagccaagatcacaccactgcactccagcctggtgatagagcgagacaccgtctcaaaataaataaataagtataaataaaaaatgtttaaaaagcggttaagagtgctgagtctggatgcctagctttgaacctcagctccagtgtcagcctattctgtgaccttgggcaagttattccttctctgtagatcgcagtttcctcttctgtaatgtaggagaaataaattctgttttagggctgtcagggattaaatgagttaacacatgtgacctctttacttaaagcataccaaagtgctcagaacagtgcctgggaaataagtgcccagttaccagttggctactaattatggtactattataactgtaacattatatcataacaataacaataatcattgttatttctctagttcagagttagactaacatttatctattatgtacccagtctttcattttatttcattgaccctcacatcaactctttgtagtgagtacatgctattattactcctatttttagataggagaccttgaagatcagagatgctagttttttcctcattgtcacacagttcataaatggcaaagccaacatccaaacccacatgcctgagtttcatagcccatactctttctgctataaccacatacttgaagatgaggcaagaatagaaggttaaatttacgtctcccttgagtcaccacatatgaaagggaaaacaattccaagttaataaactagagagagtacagcatttattttttccttcatcatgtcctccagcttattcagctggtgctgcacacagtgaaatgagtaattagccaggatgattttgattaaaatggaacataccaattaataaatgaaagtgctggcatacttgctaatttaacaacttgttcatggtgccagctttccagttaaaggactgagaagggaaaacgttcctccacctcttagacaagatgattagatattattcaactgttcattcttgttaacagttgctttcttatttgagaatagcatgaagttttgttaaaattgctagagtgatcatctcccagtccagttgtctcagatgtgacatacttggtgtggttcctaatgggacctgtgtgtatacccaattaagatttttttaaattatttatttatttatttatttatttgagatggagcttgctctgttgcccaggctgcagtgcagtggcttgatgctgggacactccaacttccacctcctgggttcaagcaattctcctgtctcagcctcctgagtagctgggattacaggtgcgtgccatgatgcctggctaatttttgtatttttagtagagacggggttgcatcatgctggccaggctggcctcaaactcctgacctcaagtgatcctaccatctcggcctcccaaagtactgggattacaggagtgagccactgcacccggcctgttaagaatttttcattgccctcccatccccactcagccacctccctgggccacgccacattgaacacaactcagaatttatgagccaatttctccatgcacacttcttcaactaccccttactttatgttaatagcatggacaccacttcattgcattcctttgcatatctgtataatacatgtgtatctctgtgtttattccagacctaaccctggaagggacagatccatgcaccataagacccctcactctgagttcccctatcctcaaatgaatggaccaaggatcaatggcaaacccataggtggcccctaattcagtggcttatgacttgtatgatctacttaaataccggatctaaagtccattcgattttcaaaaaactttgagcaatgccagaaggtaacatatgcttgggaaatattttggcccatgtacatactgatgagtgagcccaagaagtcagagtttaaagttagttggccaataatggtagaaatatgtctttgctctaagcagtagttgtcgtgtcagggatttcatcagatacaactggaagaagaatatttcctgaagcaatttatccttcttaaagatctcatactcaagcccataaattttaattttataggtgtagacttggtttaatatttcctcaactataactttcctcaattttcattttaaatcttcaagcccttactctctacttcatcatggatgtcaatgacatctctgtgtcaatttttttctctttttcacttatcatttatgtgaaacttgaagttttccttccgattattttcttctcctcactttcttcacgtgtttcttcactctagtctcatttcatcttcttccatcagccttcagtttcagctatatttcacggatcccaaacagcattctgaaaatttgcctacgttattttttctaactataaatctgtatggtctaatatcaggctaaatgataaactgaagatagtgggaacattttgctagaactctcaacctgttacaaacatatattaacccatcttagccccctgtagtgaattgaatagtggtcccgaaaagatatgtccaaatcctaactccaatgcctgtgaatgtgagcttatttggaaataagatctttgcagaggtagttaagttaaagaccttgaaatgagatcatcctagatttacggtaatccctaaatccaatgactggtgtctttataaataaaaaaagagggaaatttgagacacacagttgcaagagacacagggaagaagccatgtgaagacagaggcagagattagagttatgttgccgcgagccaaggaacaccaggagccaccggaagctggaagaggaaaggaagggtcctccccacagcctttggaggaagggtgatgctgccaacgccttgatttcagatttctggccttcagaaccgtgagataacaaatttcggttgttttaagctaccaagtttgtggcaaattgttaggacagccctaggaaactacacagcccccttctgaaacatctcttcattttgagaaatagctctgccctctgtcttgggattaccatggaaacaggacattgctgacctcccagcataaactcagttaatcagatttagtccctcagtaattcccttgggattagtaccaagcaacaccagagtctgtctgcctgccctccggaagagagcatatgtgggtgtttgtgttccaccatttgccctgggaagcagagaaagcttgtctgcaacaagagaggagaacaaagtcaatgaccagaatggaagagcaatgaaagtcagtcgtgtgttgtgaaggcattagaatccctggatgtttgttcttgagacccggatgtttccatggtttccatgaaatgctcccacccttcgtagttaaattccctaacgtgcttgagcaagcttagaaagagttctataactttcactggaaaatgtcctaacatatcacaaacacacgtctttatatccttctcttttctcttttctc

SEQ ID NO: 94958 - DNA, 68502 bp, Homo sapiens
tcatccactttttgatggagtttctgtttgattcttttaaagtattttaatctctttgttaaatttatctgatagaattctgaatttctcctatgtgttatctttaatttctttgagatttctcaaagcagctattttgaattctctgtctgaatggtcctatgtcttgtttctccaggattggtccatggtgccttacttagttcatttggtgaagtcatgttttcctggattatcttgatacttgtaaatgttctttggtgttaggatttattgtagtcttcactgtctgtgtttttttgttcctgtcctccttgggatggattttcagatatttgaaaagaccggagtattttgatctatgctgtatctgctttagagggtaccacaatcccagtaatgctatggttcttgcagtttctagatgtactgctttgatggtcttggacaagatccaggataattctctggattaccaggcagatactcttattttctttccttactttctcccaaacagagtccctctgtcagttctgagacacctgaagctaggagtggagtgaaaccagcacccckgaggacaccaccactatgactgtgctcagccagacttgaagccagcacaacactgggtcttccctgctgtaaccactccctggccactgcctatgtttgctcaaggccttggggctctacaataaacaggtggaaaagccatccaggtctgtgcccttcccttcagggtggcaagttcccccaagccccaggtgggtccagagatgttgtctaggagtcagggactagagtaaaaaacctttgaagtctacctggcattctattgcattaaaattgagctggggggactcgggggaaagtgtgagaggggagtaggggataaaagactacacattgggtacggcgtacaccgcttgggtgatgggcaccaaaatctcagaaatcaccactaagaacttatctgtgtaaccaaacaccacctgttccccaaaaacctattgaaataataataataataaataataataaaatgaataaacaaaaacactgagctggcactcaaaccacaaaacacagtctttcccactctttcctcccctgtccaaaggcagaggagcctcactccacagcccacaagaagtactgctggattatcactggtattcatttaaggcagaaaggctattaagtcagctggtggtgactgctgcctggcctgggactcactctttggggcagtgggcttccctgtggcccaggaaaggtctagaaatgctgttgaagagtcaactcttggaatcaagggcccccaagagcttgcttggtgctttacctccctgtggctgagccagtacctgaaaccagctagtctcagaggctcacccaaggcccttgatgtagtatctgggtatcactgctggttattcagagccaaagggcttttcagctagcaggtgatgaacgctgccatgactgggtctttcccttcaaagcagtgggttcccttctggcccagggtgtttctaggaatgtcacctggaagctagggcctggaacagggacctcattattctgactggtgccatatctgttgtggctgagctggtatccaagatgcaaggcagagtcctcctcaactctttcctctcctcttctcaagcagcaggaaggggtctcttttagagttgtgagttgtgcagcctgggattggggaggggtgatgccagcactcccttggctgccccagctggtgtctcagtatattttgcacccctcagtccactgtctctggccctagttcagtactaggacttgtctaagaattgcagttcttttggcctaaactgcctttcaggtttagtcagagatccagagcacttcagccctcagtggtgaggtttgtgggaactgaaattctgactgctggaattagtgattcccctttggctgggactggtttgaatgctccctttatgtgtgggcatcagctgaactttgtctggctttcctttttgctgtaacaggacaacactgagtttaatgcctcaccattgatgtgttctccctcacccagtgcacgaaaatgctctttgcaccacaccacagctgccagggtgtgatggaggggtggcttcagtgcttcaagactccttctgcaaccttttcagtgcctttttcagcaacacaaagttaaaagcaggtactgcaagtgctcacttgagttttggttcttgtgaaggagctttgcttgcacagatagttgttaaattggtgtccttgttggggaaacaatcagtggagccttctattccaccatcttgctccacctcccatagtactatacatctcttcttttggctagttctgtttggatatttttgctataataaaactgtagttgtaagtatagtgctttccagagttctttaattttttttagtgaattatcaagcttgaagggttagtggggattcctaaatatggtagccagctgtttagaagtataggtagcttacgtaaccttgaacttgcagctgatgtctgaagtaaggacagtgttatggaggaccatgtccttaacttttgaagtttggctcaactctagtagttgttgtcaaaagttgatgtaacatgcctagtaattttaggaatgctggatattgtaaaggctatattcttacttgtctggatttaattgacttcctttaaacagtgttggactgtgttaggttacttgtgagtcatcttgatcctttgggggattgattttatgttttgttaagaagatagcttttattctacctaattccaatactctgtagatcatttctactactaaaccatggccttctgggatctcccagctagctgtttcctggagattataaatgactctaacacatctttcatatgcaaaccaactaattcagggctcatacgttccccaaccacttcctttatcaggactctacaccctgggccactattctcctgccctaatcagccaggtccaggtaacagaaaagtaaagacagccgctgtaccccagagcctgctaaaagtattcaaacgagctaatcctaagcctgattaccttgtcatgcccactctttcctgcagaaactacagtaaaggctcttgcccaccttgacccctcactccggctgcctcctaacactggtgcttctccatgtggtcttgggtggtgtgctgtgtcttctgtttgtagggatctgtcgatataaaccttttccttcacgatagtcatttctgtgtctgcatatgttaccacattgattaaaaagagtaagtactgtatgattccacttacccgaaattcaaaagcagacaaaattaacttatggtgttagaagtcagggtagtggtgttttttttttttgctttttttttttttttttttttttcctggaaggaggatgtaaggaggcaggagcacagatcctgatatgctgataatctgtatcttgacctaggtgcagcttgcaagagggtgttcagtttgtgcaaatcaaccaagctgtatatttataattgggcactttcttcttgcatgtaatacagaccagttgcattattggttccaattttctacctcccactatatccctgccctttaccatgtaactttacaaatagtctctcactttggctctagaatccaccatatgacttgatttggccaatacaataaataggaagtaagggtgtgcttgttcttggcctgagcctgaagaggccttgtgtgtttcttctactctcgtacttttgttattaacattatatagacrtggtggagctagctcactcatcccaggatgagagcctcagctaagtttctccatccaaacacagcctggagctgggctctaacttgttacacagatgaatgagtgaatattgttaagataagtcaagcccagcccagatttctgacccacagccaacccacagatgcataagctgaagatgactggttttatcaagctaattgttataatagtggagaaaagatcatgaggacaaaaagtgggcagagtcggaagaaaagagaggaagaaattgagacagaagacatttcatttaaaaaaatattccattgagctgggtttgaaatagtgcactgcctgttctcctaatgctgtatggtatcatgaaatctattgtttactgagtctatgagccagcttcctagggaggctatggcaattgaggacagggaagaggtaacactcaggaacatagaaggagaatttgggtccaagtgggtggagggaaaaataactgggtttagttttgggtagggctggttttgaggtctctgaaggacatgtaagtggagttttccagcagggagaaaacgcagagctaaagctcatatctttgctggcaatctagatttgggcatcttcaacaagcaggttgtagctgaggaagctgggactggacttgtactctaaagccagtgcaaaaaaagcttgaaacggctatgatggctaagacctggcttttccatgaaaaatgcttcggtcagtatgagtgattccaaagtggtgatcaattaaaaactgaagtatgattagcattaattataacccaatgggaatatgataaacgactcttggtcagcaagcagagggtgccctgtagtgctaaagcatcaccatataccatgtgtgccaagaatcaggagacaccccaaacgggagcagatgaggggttgtgtctgtcattggaccagctggcctgatccagcagaagtggatggagatacactgaatggggctcctgggaggcgtgagttgaaggggaaggaagagaagagacctccaaagtaagggaagagtgaaaaatgagaaggactggggtggagccccaagtagggaccagaggagaaaacagggataaagtaatcaagggagatgggacaggaagatgaaagaatgaggtaaacagcaggtgggaagaggaggtcaacctaaaggagaaagccgggtcgaagaaagaaggaagagaagaaaagaagggttgggaaacagaggaggaggcagccaagaaagcctggaagctgaatcatagaacggaagaggtagaagacggaggggctggaggataacataaaggtgggaaacggaagagagaaagaaccgcgtctgcgtgtatgacggctagacaggagttcagagaacagcggggtcgccaggccaccacctgatgggccacggctcattggctctaggagctgggaaagggcatcccaggaaagaagccctagactttagcctgagtctgggccactctaggggaccgggagtggggtggcgggagaggacgcgcagaatctcgacttctggccccaatctgtgcatgatcacccgagctcagcggacgctcctctctgacccaggcaggcggctcagggacgcgtgcggggatgcagagagaaaccgctgaggaattagggccgggagagactggtacctgccgggggcgtgtggtggggcagagctggcactgatgctgagagtggctaaggagcgcggcgccccagagcagaagggctggcagacgctcagagagccaggatggttcagggtccaaggaaggtcctatgttgggtgggagctgtgagggagtgaaagtgcatgaggaaccggaggagatggaaagaccttggcttgggtgttcgagggtgggactgcgtggtgaccgacggcacagagggtgtgtgttggggcggaagaaccaccccagctgaatcgtccccgtggggttttcttcccgtgtcttagttccagaagttgccgcatcagacgctaatagttgaggaacaagtcatggaaggacagcctaagcgggaggtgaatgtaaagccgtggagagggcgggcgaactaagaaggccttcgttctcctccggccaccgcggctgcatccttgagaaaggggtattgctgcgaagccgcgccagggctggacgcggcgaggtgggaggcaggatggaggggcgggagccaaggccgagggggcggacacgggtggcgtctggcgctccataaagsggttgcgggggccgcgctctcttctgggagggcagcggccaccggcgaggaacacggcgcgatgcaggttcagtgccagcagagcccagtgctggcaggcagcgccactttggtcgcccttggggcactggccttgtacgtcgcgaagccctccggctacrggaagcacacggagagcctgaagccggcggctacccgcctgccarcccgcgccgcctggttccwgcrggagctgccttccttcgcggtgcccgcggggatcctcgcccggcagcccctctccctcttcgggccacctgggacggtacttctgggcctcttctgcstacattacttccacaggtagcgtttttcccytgcgggcgcccagtgcagcgcactgccctgctcccggcgtccaggagcgcagcgtrgagcgcgcaccgaggaacgccaaggaggcagcgtggggcgctgtgaggaacgcggaggccagcctgcctggcgcacctggcgggggccggggccggggcttggacgctagagagttgacaagcggctgcggcacagacgccgccttcactcccccaggacctcatccgctctcagcagctccaaatcctctggctgctcgagagaaagaggtcctgcgggcgggaggcgacctggaaagctcaggttggggagacctattggacaggactgttccttaactgcgcgcaggcggcggttacctgtggcatatcgcgycccgccccgcttccctttcttccttcaccttttccttgcagggtggggacagattagttctgggatcttgggagagtcttacgcgtttggcatctcccgagggaaactcagctcagaggttctcattgatttagtctttgcaggtctaaggaggaaggtgggtagagcccaaatccagacttcacagatggggaagagaatatagtgagatcccactgactcaagcgagggtccccgcttcttaggcccctcccaaaagggaccaagcacaccaccaattcatctacctttccaatttccctgggacttgaaatgtgagtgggtaacttacagctcaaatgttcttctagatttaaaaaatccgggttcaggagaactttgctttctgctctgggaaggaaagacaggaaagagaccaagggatgtyagggttcagagaaagactgtccagcctcagtaaagtctcacagggaaagggaagaacgaacacattgttaaattgcctaccatgcccaatcgtttagtatctatggtctcacttaactctgttgtaaccttttgagagatatttattatgtccactttacaaagaaactgaggctgagtaaggttatgggactgaaagaagacaatacagctggtgcccgctaagatgcaaatctgagcttgtgaatctctgaggtttaagaccttttagccgttttaagtaggcagatattctatgcaagaagagaacagagcccataaacagagaaaagttatcaaacgaaatcaaaaccttgaaggttttgccttattttgagtagaagattcctagggtcaaaagatcaaggaagtttggattagaaattaggataaagaatgcctctggcataatctgtctcgtaaagagaaagtgatgcctcatttcgagagaagaaggtgtcagagacggatttcaaactgtctttcttaatttcctcttatcctctgaatcttctttattggtcaagatttaatatttatgcaatcttaactgaattctcactctttttaaaaggcaaatgttgtcaagtaataagaactaaactgtatcctttcaacaaatatttactaaaagcctgctgtgaacaagattctttattttacacagattttattttactcagatttagatggtttaatttgcacagaaagaaggatgttggatacaggagataagagattagttttttatttcactgatttttgaacagacatttgacagaaatgtgatttttgtcaacaattatttttatcttcaaattaactactgtatgttggcaacataagcaatatttttatgaggtcatttcatcttaatgattagtgttttgtgacaatcmtattaatgtaatctttaggcttgtttttgaaatcaaaaggcactttgcacaatacattatgaccggtgcatttaaaaaaaaacccaaaggagtaattatgcataaaacaaatatctacatattgtccttcttcagaggaaattttaaaatattagtaaaggacttggagattcattctgcctgagggaaaattgcccactggaagtacaactcttgagctacttgttcctgaggcatcgggatctgatgtttgtctttcctcttttttgaattctttctttgaagccactggagtgtgtgatctgttattatttgagtgcttacagggtgttacactctgtgtgccaaacactctgagtwaataatttactcatcctcataccaacccatttaggtaggcacgcccattttgcaggtggaaaactggagcaagaaaaggttaartaacttccttgcccaaggtcacacaataacgaggaatcagagttcaaacccaggcagtatgactccagatctcaggctcttcaggtatgatartaaactgttgtatacttgttggataaatgcgacctcattcttgctttttaaaaactatatttattcttaaaattattatgtaaaaattttttaaattataaaaacattttttcctaatgaaaaatggaaaaatcccaaaagtagaaaatactcataattacatctaagtatattaaatattaatgttttagagaatttctatcaaatctttttccttagtagattttcacacatgcttgttatgttgaatatatggttttttagttctgtttaattacctaacattttatagtattttccaacattatcacagatttcttaatatctgcttatttcatctactgtaaaaataataatttacctatatattcatttatagytggacatttaatttgtcttggggtgaggctaggttcattgaagctgtgatgtacattttttgcatctaaattcttttcaaaggttagatctattttcttaggatttccagaagtggttcaaaggttatgaacattctttagggtcttgatataatcatacatatctgtttcgaggcttaaggagtcatttggcttgatactgagggtgcattaaggaacaagcatcaggctgtcttggctttatctcgtgctgtgtgttgctaagacagagaataagacggagagacagggagaaaggatggctcaggtttggctcagactcttttgcaaaatgtccattggggactgttcaaagcagcaatatgtcccatcaaatagaagttaaaactcattgtacttttctcaatacaaggatggcacacaagaatgtagattccacagggtcaaaggtttttgtctcacttttatggctgtatccccattgtatacaaagagctggtacatagttggtactcactagaatttgttgaatgcatgaatgaactctacttacaacaaccgtacagacagaattgtaggagagctagcaattacttgggaatcataattgctgagattgcatagttaggtcaattcagataactttcctctcttcagaatctattgttgtggctgtttggattctttagccacatggaaatgactgctgcctaagcacattgcctaatcccactgccaaagkcatttgaagtcaagagttatctcacctcttttttttttttttttttttttttaatgtttttttttttattatactctaagttttagggtacatgtgcacattgtgcaggttagttacatatgtatacatgtgccatgctggtgcgctgcacccactaacgtgtcatctagcattaggtatatctcccaatgctatccctcccccctcccccgaccccaccacagttcccagagtgtgatattccccttcctgtgtccatgtgatctcattgttcaattcccacctatgagtgagaatatgcggtgtttggttttttgttcttgcgatagtttactgagaatgatggtttccaatttcatccatgtccctacaaaggacatgaactcatcattttttatggctgcatagtattccatggggtatatgtgccacattttcttaatccagtctatcattgttggacatttgggttggttccaagtctttgctattgtgaatagtgccgcaataaacatacgtgtgcatgtgtctttatagcagcatgatttatagtcctttgggtatatacccagtattgggatggctgggtcaaatggtatttctagttctagatccctgaggaatcgccacactgacttccacaatggttgaactagtttacagtcccaccaacagtgtaaaagtgttcctatttctccacatcctctccagcacctgttatttcctgactttttaatgattgccattctaactggtgtgagatgatatctcatagtggttttgatttgcatttctctgatggccagtgatgatgagcatttcttcatgtgttttttggctgcataaatgtcttcttttgagaagtgtctgttcatgtccttcgcccactttttgatggggttgtttgtttttttcttgtaaatttgtttgagttcattgtagattctggatattagccctttgtcagatgagtaggttgcgaaaattttctcccattttgtaggttgcctgttcactctgatggtagtttcttttgctgtgcagaagctctttagtttaattagatcccatttgtcaattttggcttttgttgccattgcttttcgtgttttggacatgaagtccttgcccacgcctatgtcctgaatggtaatgcctaggttttcttctagggtttttatggttttaggtctaacgtttaaatctttaatccatccatctcacctcttgttgactgtgattacagctgtggaatgaccccttgtctaaactctctgattggtcttcactttcccaagaagtcttggtgttccatacagtggtcagtcacatcacttatgcatgtggtggctgatgtctttttcaagactttgatgggaccttgataactgaatgaacaagacaaagaaacatttttttttccagagaagaagtgactacattgtgaaaaggttttgggcaatgtaatttccatgatatacatctagaagcagagtataatgcacacattagagtctgtttgaattcggagagatattccttgaggtttagatgctgaaacatttttttgattagccaaataaaatgatggcttcaataaggtgctttttgctttattagtcagttcattccccagcggaatttctcctcatccttcaagattcaggtcaggcatcctttcctccaagaagccttgtctgagtcttttcttttctctaaatccagttgtgatgctgttctttgggctttcataataggcagtgtggctttcgatgaggcatttcacacactggatcataattatctgttctaaggaaacgtagttctcatctgcccagcctcttcattttacagaagcaaagcacaaaaggttgggtcagttagggggaaatcaaagagttggaacttgagtcttctcatgagcccctgccaatgcttctcttatttcacgagaggtgcagatgtctcaactattcagaagtaatcagaccttgctaaggaaactactcatctgctgagaatcagaatgagaattaatggctactttggaaacaatagacaaatctctcctcttagagattaagaaaaaaaaagcccaagcaagawaagcaacattcctgtgatcacttaatcatgtgttaaggatgttcctgaatcataatttaaataaattaagattaattgaaggatttttttagaatgagagtcagcaaactttttctgtaaaaagccaggtcatgatctctattgcagcaactcacccctactgttatagcgggaaagcagctacagacattatgtaaacagatgaatgtggttgtattccaataaagctttatttacaaaaacaagcagtgggccatatttggcctatgggccatagtttaccaatcccttctaaagaaaactatgaatggcgtggctttacattcagtgccctggtaattctataataaaatttggttaaattctatagcaaagcagcgggcatatcttagaaaatttctgctacatgtaagtggggacttggcagtaaatattgttttctgagaattcttgggttctaagtttttatttgaacttttatgggaaaatagtaggagtcttggagttttcattctaaatggaatgacatcataagcacatctgaaaaatatatagctatgtttgccaaaaatataaaccagctttggagatcgtgaccacttcacttttaccacactgaagaaaggaccaactttttgtccatttaaaatctaatttaatgtcacttaaraagaacaaacaaaataaagaattacgatgggaattcaaggattcagactggcaaagtgacatgtaccaagttacatggcaagaaagggcagagtggagcttgaagcctggtctcctgatctttatcagagttctataggctcagaactatgctaggtctcatgggagtcataggagtacaatacctagtgcttgccctctaggaagaaggcaggaaagaaccttcattgtgtgcttctcactctttctggtgtgaaacttgggtggcagcaacgtcagtctgacaatatcaggcaggtgggaaaatgtaaactgagggggaaagaagcctggttagcacgggcccccgccaggccactgaacattcatctgagagggccctagtgcctgtctatgtttgattgtgcatgggacagggggcagatagataggtggataggtgttgagggggcctcaaaatggcacccttcttctccattcaagttcagaactaactgagagatccaggaattaggtaactagagacatattaccaccttttattactggtaaagctggtttgggggaatgtggcttagatttttggattatatgggccttataacacagtacctcagaaataattagctatgatcatggctgggcaaccacaggcctctcacagtggtacctgttctgaaaagacagcagaagggctgagctgtacgcatcctttggcaggtcctgctcccagattgacccatcrggtaattcacatttccttgcctgaggaggaatgggtgagggacagtggaagggcttgcagtgatgctctaatgaagggccctcagccagctgtagggggagcataaatattttttgttactagatggaatacaaacgttgtctacttattgaattttgccacagcctggcaacttgtttctgcaacttggggtacttcccgttctgctgttgactccctgccatgtatggcaatggggacatcaaagtctggactcaagttgttttaaaagtttctgtgctcaacccaggagcctttaacgagactcagctcaacataggagctctaaattttaaaaacccctgaactagggccaacagtgcaatttgtcttccatttggttatagaagggagagaagggaaaccaatatttattgcgctctgggtgttccaggcattatattatgttctttgcattggctatctcattttgtccttgaggcaatccctgttattagtgctattttacaagtgattgcagtgcagagcattgatggagtgagtgggagtgaagatgggagacttgacctggtccttgaagaatggcctgttcccagatttctgggtggggacatgatgtctgttgggaaaaggggcccatttggtgatctgtgacttaaatttgccttatactttgtatactcagtcttggagtatctctctacttttagattccaaacatcttctgtaactatgccatattatccagtcctactacccaagtcttaaattaggctctgggcctctttcaatttcttttttttaatatttgctccatattgttaaggctgatcctagaagttactgtgaagaaaacagggtaatttggttttgatattttttctttctaaccacgaaacatcccaagatcttttttcatgtatagactctggttctctcttgcctctctgcctkccctcttgtatcagcagtacatgatcttacttctatcttttaaaacttaactctgtgtctcatgctgtcagtcaatgccctttacttgccaaaagttactcatgtgataaacaaatctaagttctagtgtattgggttgtttgttttcttattattgagttttaaaagttgtttatgtattctggatagaagtattttgccaggtataaacttagcaaatattttctctcagtttgtgacttgtctcttttattctcttaactgtcttttgttttaaaaaaattatttttaggttcaagtttacatatgcagttctgttatacaggtaaactacatgtctcaggggtttggtgtacagattatttcatcaccccagtaataagcatactacccgataggtattttttcaatcatcaccctccttccatcctccaccctcaagtagaccccagtgctgttgttctcttagtatccatatgtacttggtgtttagctcccatttataagtgaggatatgcagttggttttcagtttctatgttagttagctgaggataatggcctgcaaaggacatgatctcattatttttcatggctgcataatattccatggtgtatatatgccacattttctttatccagtccaccattgatggatatttaggttgatttcatgtcttkrctgttgtgaatactgctgcaatgagcatgcacatgcatgtgtctttatggtagaacaatatatattcctttggggatatacccaataatgggattgctgagttcaatggtgattctgttttaaattatttgagaaattcctcctagcagtgtataggcrttcccttttctccataaccttgccagcatttattatttttgactttttaatagtagctattctgattgatgtgagatgatattttatggtggttttgatttgcatttctctaatgattagtgatgccgagcattttttcatatccttgttggccacatatatcttgttttgaaaagtatctgttgatgtcctttgcccrcttttaattgaattgtttggtttttgcttgtaaattagtttaaattccttatagatgctggatattagacctttgtcagatgcacagtttgcagatattttttcccattctgtaagttgcatgtttactctcttgatagttttttttcctgtgcagaagctctttagtttaattaggtcctatttgtcaatttttggttacgttgcaattgcttttggtgtctttgtcatgaggtctttgccagatcctatgtccagaatggcattttctaggttttcttctagggtgtttatggttttaggttttgcatttaagtctttaattcatcttgagttgatttttgtatgtggtgtaaggtagtggtccagttccaattttctgcatatggctagtcagttatcccagctccattttgaatagggagtcctttccctgttacttgcttttgtcaactgtattaaatatcagatggttgtaggtatgcagcattgtttctgggcactctatcctgttccattggtctatatgtctgtttttgtaccagtgccacgctgttttggttactgtagccttgtagtgtagtttgaagtcaggtaatgtggtgcctccagctttgttcttttttcttaggattgcctggttatcccagctcttttttgattccatatgaattttaaaatagtttttttctaattctgtgaagaatgtcatcagtagtttgataggaatagcatttaatctgtaaatcgctttggcagtatggccattttaacaatattgattctttctatccatgagcatggaatgtttttctgtttgtgtcatctctgatttctttcagcagtgttttgtcattctcattgtagagatcttttacctctctggttagttgtattcctaggtattttattctctttgctgcaatcatgaatgggattgcattcttgatttggctgtcagtttggatgttgttggtgtataggaatgctagtaatttttgtacattgattttgtatcctgaaactttactgaagttgtttatcagaccaagaagcttttgggaagagactatggggtgttccaggtatagaatcacatcatctgcaaacaggaatagtttaacctcttctcttcctatttgtatgccttttatttctttctcttacctgattgctctggccaggatttccagtactatgttgaaaaggagtggtgagagagggtatccttatcttgttctagttttcaaggggaatgcttccagcttttgcctattcagtatgatgttagctgtgggtttgtcattgatggctcttgttattttgaattatgtttctttaatgcctcatttgttgagggtttttaacatgatgaggtgtttagttgtattgaaagccttttctgaatctattaagataatcatgtagtttttgtttttagttctgcttatgtaaatcacatttactgatttgcatatgttgactcaaccttgtatcccagggataaagcctgcttgatcctggtggattagctttttgatgtcctaccagattaagtttgccagtgttttgttagggatttttgccctgatgttcatcagggatattggcctgaagttttctttttctgttgtgtctctgtgaggttttggtatgaggatgattctggcctcatagaatgagttggggaggagtccctcttcctcaattttttggagtagtttaagtaggagtggtaccagctcttctttacacatctggtgtaatttgtcttaactgtcttttgaaaaacagaaatgtttaattttgatgaagtctaatttttccatttttctttggcttttgatgtgatatctaaaaaatttttgcctaatctaaggtcacagtgattttctcttatatttccttctacaagatttgtagttttaggttttaatttcaggtctatgacacattttgaattaatttttaaagtaggtttccaagtttgaatcaaagtttttttgttgtgtttttttttttttgttttttgttttttgcatgtggacagtcaattgttttagtaccatttgttgaaaatactactttttgtccaatgaactgcctttgcaccttaactttaaaaataggagaattatatgaacagatactttgccaaagaaaacgtatgattggcaaacaagaacatgaaaggatgctcattattagtgattagggaaatgcaaattaaaccacaatggggtatcactatgtgtctgatagaatggctcaaataaaaaatactgaccataccaagtgtttgtgaggatgtggaagagctggaactctcatacctttgatgggaatttaaatgacaaccactttggaaaatggtttgatagtttcttaaaaagtgaaacatatacctatcatataatgtagccattgcatttctggttatttttctaagaaaaataaaagcatgtgttcatacaaatggtggtagcagcagcctgactggagtggctgcagtgttagaggcatggctggggctgcgcactccacagagctggcacggccaggaacaggcatgagccccatcccctaccaagttggtggggcagaaggccagtgctccttggcgcagctgcagccacccagccatggctctggacccgggcttccctgtgctctcaggggcctgggaagcgcccctgcccctgaaggcttggaagtacctgctcccgctccttggcctcttcccactctaggcacctgctctggggtggaacaaagttgtggctgagccaaggtgctgttgctcggcctggcatgtgcaagctcagggcggcattgacacaccagccccctgccgccttggccccctccagactttgggtgctgatgagcatgggaggaggggcaagtgggggctgagggtggcttagtgcaggcttgcaagcaccccttggcactaacagcctgggcaccatggatggcatgtggatggtggcaggaggcagacaggctcctgggtggaaaggggcaggtctcgggtgaaaccccaccttcaagccagggatggcctgaagcctgggtgctgggctgtcaattctggatggagtcagtggcccagagtgacaatttatggtgctttttctgaacctgctcatggtggcccatggaccaatcagcacgcccttccttctgaggctataaaaactctggactcatccagacttgggcagacatcaggactaccagctgtgggaaggaactgcccactttgggtctcccgagagcctctctgtcactcactgaagctcctctctgccttgctcatcctccagttgtttgcgtacctcattgttccyggacacgggacaagaaatcaggacctgctgaatgcggggactgaaagagctgtaacacaaacaggtctgaaacatgcccccctgcttgtcacattgcaggcaacaagaaggagagaagagctgggacccttcggggagcccagaactaggggagccctgagccagggctatgacaccctctttggggctttgtggttcctggcatctccaagcttccaggcaccaccatgttcccttcatccagatgtgggtgcccacagtggaagccacttggggtacatctggtccaaccatagcctcacatggagccggcacttatgctgtcatctggagctgcttgccttgcccagcaaccagtgtgcctggctgtgcacagtggctggaccctgcgctcactcacacacacacccctcatcattctgtgcctggctcacccttggcaggtgtgggatccaggcctgtagcatgagccaagtgcagcctgccaggctgagtggacagattgagctcagtgggcatgagcaatactcaggcagaaggcactactggccacagagktttccagctggtgaagtgacaccccaaggatctcgtgacacaaagacttgtatacaaatgtttgtagtagctttatttgtacaagccaaaaactaggagtacatgctttatgattatgtttatataaaattctatgaaatttaaactaatctatggtgacacaaagtacatcagtggtttcctgaggacacaagagggacaagaaggtagaactacaaagggtatgaagaaccttttgttgtgatggatgtgttcattatttttatgtcacatggcttcrtgtgacatgaaatatatctaccaaactgcactggtagwtatatatatatatatatatacmyacacacacacacacacacacaccaaattgcaccctttaaataggttcagttgactgaatagtaatttacttcaataaaaataagaaaactaggtaggcctgtgaaaaaattatatgtatatgtggccctgtgtcactgagaattgttcaaagtttctgtgaagttcatctggaaatgttcaacaagtgctgataagctgtttcacttttttgaggtgtgagtagaggagggccaggaattctactcaagggaaataatccaaaaggaagaaatcagtctacacaaagttatagtgttactattcacaactgtgaaacactggaagttacctaaatgctctacaattggggattgattgtaatcaatatgattaaattaccatatatatttcaaaaatattagttgcatggactatatctgtgtatggaaataaatatatggagccatttagttaaaaagtagcacataaagagtacactctgatttaatccatgttgacatgtacaaatgaaaattgaccatgattggaatataaagtgatgtaaatagctgataatttaggtttgtattttttccttttagtattattaaagtatttaattatttaactcctattataccttatagaagaaataatactgtattacaaaattttaagatgtattttacaaactgaccatgcaattaaatctcagcagagatatgacaccccataagtagttactgttctgarggattttaaaagtcacacttcgtgtgtgagatctcccccactgagctgctatgacacaacccacttatgaaattgtcatctttctatttctcctttgtatcaagatgttgatgatcccttaacatgcaatcatgttacctggcaaagtagcacttggcaaagtccaaactattatccttttaatattttgaatctgagaggatctcatctctttcatccttaatcatggtaatttatattttccactttttttccagatctttttgactagagctttagaaattgtattgatcatctcagaactagatttttatttcattgagtttcactattgattttgttttacatttaattgttttctgttttgatctttattatgttttttcttatgcttactttgaattttatttgctctcctttttctatttttattaaggtggaagccaaggttataaatggagactttctctttcttctaatatgagcatttattgctttgaatttcatcctacatattgttttgtggcacctcacaaattccgacatgttgttaccattttaatttatttcatgtattttaatttctcctttgatttattctcatatctatgggttatttagaagggtgttatttagtttccaaatgtttaggaattttccagacatgttctgtattcatttctaatttaattccactgtggatagagagcatactttgtatgacatacatccttttaaacttactgaatttaaaacttgttttatggcccagaattgggtctatcaatcgtaataattgttctgtgtaaacatgaaaagaatgtgtatactgccaagaagaggagtgttctaaaattgtccataggttattttgattgttagtgtgcttcaaatttctatatcctgatgattttctctctacctattctaccagttattgagagaagagtattgagatatctgatcaaaattgtagacttgcttttttttcttacagctctatcagtttttgcttcatgtattttgaaggtctattattacatgcatagagacagaactggtatgtcctcttgatgaattgatgcttttatcgtgatgaaacaatcttctttattcttggtaatatcttgctttgaaatctacttttgtcttatattaacttagccactacagatttctttttactagggttaacatggtatatgtatctaccatgtttattccaacattttacttttaatctgtttctgtctttagatttaatgtgtgtgtctcaaaggtggcatactgttcaatttttctttccccctgcccctgccattctgacaatctctgatttttaactgggatattagaatgtttatatttaatgagattatttatacagtttgaattatgtctatcatcttgctatttgtttccatttgtgtctctgttatttgttcctatttcctatttatattccatcttttggatttagtattattttatttcaatttatattgtcagtttattcattataactcttttgttaatttgcttaaaggtttattgcatgtatcttaaatttatcagtcttccttaaggtgatattataccacttcaagtatggtataaaaatctgaaataatgtacttccatttcttctctcttgcccttatgttattgttgttgttttacttacatatgtgctataaaagcctcaacttattactattatttttgtttaaatcgtcaattatcttttaaacagttttaaataagataataaaaaagttatatatttgcttatgtggttgccatatttgatgcttttcatttttgagggttgatttatatttctatgtggtatcattttttccttttacctgaaatcagaatttatatttctgaaagtgtttttatttcttgttttcgaagatagaaaattctaggatatagcaatccagattgacagctgctttctttcattactttaaagatgtttcactgtcgtcttgtttgcattatttccaacaagaaatctgttcttgcccttatccttgtcctctgtacttaacgtatcttcttatctttgcctacttttaatattttcatgttatcactggatttgagatgttgggttactatattccttggtgtatttatatttcttattctgggcttccttaaacttgaatccatgagcttgagtctttcatcaaaattggacgattttcatacactattcttcattccctccctacttctcctttcttttgctgaggaaaatatctatgagacctacatgtatattaaactgtcctacaactcactgatgctcttttcatttttgtggattcttttttttttctgtgtgcttcttttgggtaatttctattgctattcttcaagttcataatcttttcttctacaatgtcttatctgttgctaatcccatctctggtatttttatctcagggattgtagtttccatctctagaattttggatttcggtctttttttctctcttccatgtccctacttaattttgtgaacacatggaatgcagttataacagctgttttaatatcattgctaacctaatatctgtgtcatttcggtgtcagttttgactgattaattatttttcctataataagcagtgttttcctccctttttgcatgcctggtaatctttgattggagggtcagaaaattgtacctcattgggtgttggatatttttgtgtttctataaatattcttgagctttgttctgggatgaagttaagttacttggaaacaatttgatcatttcaggytttgatctgatttgttcagtggttccagaagagtgttaatgctagggctaattaataatttcctctgaggtaaagcctttttgagtattctacccaatgtcttatatgagcttttctatctggcttatgggtacaggctctatttgtggccatgtgtgatcactggatactgttccctttaattcttttgggtgattctttcctcacacaaatgcatgaattaacactctgctaatacttgaggaaaattctctgcaggtctccgtgtgtctctgtccttttcagcactctgtcttgaaaattctagatgtcttgatttcttgaaatctcaattttgttttctcaactcaggaagtcttttagcttctccctgggatccccttccctgtacctcagcctggaagttttctcaaaccaggaagctgggtcagttatgaggtggtgtgagtcatttttttcttgccactcactgtttttcattgcctaatatccagtgttttgtaaataattatttcatataacttaccttttttttttctagcctggaggataaatccaattcctgttattcctccttgactggaagcagaagtgtctccaatgggttttagtatttatctttgctaattggataatctgcaatactggttgatttgttggttttagtgacctctacttgtactcaatgtcatgtttttttccccaaactttccatcttcaggcttgacgtgtaatgctttgggacgtattttacttagaagactaagtgggatagcagaatgatgacttcctttacatgagtcctgtggctccatgtagctgcagctgggaaggtggctgtaggactatagagtaggagataaagagtgggagataccaacagatggttatgaatgattggtttgaaactttcacatggaaaattatgttgcagaaacctcagattgtgcttttgttctttttttgtttgstccaaatgaacaatggaatggaggtagatgtaggagggagatatgctgaggtagatcaatctttgaatgttgcctttgatcagggctactgaatccctggacatttatttatttgttttaaaaatttaattcagggggtacatgtgcaggtttgttacatgggtatattgtgtgatgctgaggtttgagcttctaatgatcccatcacgcaagtggtgaacatagtacccaataggtagtttttcaacccttgcccctctccctccttttcccttttggaatccctggtgtgtattgttcccatctttgtatcaggacaatatttaaatgtaggtggaaactttttaamagttctcaaatttatggcaatatctaggcctcattgctgcaaaactgtacagagctgtttgcttccaaataacatcagaagacttgggattgttaatgggtacattaatatgattagattgaatgaataagttctagtatttgatacagactgactacagtcaataataatttattactcatttaaagataactaaaatagtataattggattgtttgtaacagtaaggatcaatatttgaggtggtggataccccattttaccctaatgtgattattacacattgcatccttgtatcaaaatatctcatgtaccacataaacatatacactatatacccacaaatattaaacataaaaattttttaaaaaggaaaaaaaagacctgtaaacctgggctgcactaagaagctaaacaactgaacttagaaaaccacaattttctttttgcaaacattgagaaataaaggagacaaaattatagctcagagaaatggcatgtatttatccaacagtgaaagtgcctgttatgtccttagctgctcttcataggcttgctgagctttttacttcaagctgaaaaccatcccatgtcaatatttgtattttcttgattttgtaataatcagttagcatgagtggctgagcaactgttgtttcaygatgccaaaatccacytcaagttgatcaatttatagaaaamggtaaactagttattcaaataagttgatttagttactcaggccatgaagttgatctgattctctttgattttgatcttctggggtattaaaaatttttttaaaatggagccagtggtcagtagcatgcctatgggaggtttcactccaatgatcattattctttctatcattcyggggaatcctcaaagttttttaaaaccttggtaattcattagatgtttggattgaacatctattttaatgtagaggcaggaagaaagatactgagtggacagttccaaggtctcccagtattaccaggacatgccataaatacttaaaaacataarcagggaacttaaaggttttctgctgtattttagatattcacaagctaatcatctcaaagattttgcatgatttaaatggatctgccagattaggaccattagatagttaaaaccagataacatttgcatggggttgacaatgggatgtggctgccctgtcttccagcatggcagagtaagatgggaagaagtcttgagtcattgctctttggggaaaatatcattatatgtctaggaggccttaatatttgtcttactagagaaagtaattaggttaatattgctgtgctaatagagtcttggagcctgaaaactgggctaatccacactgtaaatactggaggccgtgtgtttccccagttagggcacacttggagaggagtcaggtgtgctcttttacaaatctcattgcattattattgagctcttggaaaggtgctgagtcttcattttagaaaaagggattagatgtggagggaatcactttgctttccccagggaggcatttctctattgcttttctagggttgggataggtatatagaaggtttgattctagaatttataaaatgatattctgggaactttgagcaatattttagggagggcacccatccaaaaaactagatgagttgctgcctttctctgcaacagcccttaggagactagcttctgatcttcttcctaaacttggtatccagtttattttgcttgtcttcctgcaggccattcttgtggagacaccgagtaacaaagtcttgaagtaatgtgtgacaagctctgtagggctataggattatagagcagctactcagagggcaagggtatgaagaaaaagagcaggtgcataaaaggaacagggaaaggggagtaaaaggaaatggggaaagaggtttaaaggagatacaacagtaaaaagaagaaaagctgggaaaggagaaaggaagcgcagcaaaaaaggtggaaaaagaagagagagtgctgatgcaggtttttcaggggcctatattgggcaaagcattgaacaagttacacccaaaggccaggagcctgaaatcaggtgccggttctcaaataacaagggcttattaagaatcagtgctattgcctaggatagttaaacagaaatacaaaaagtgctggagaagttcagggaactgtgagatatagagggaaaatcaggggaagatggacaggagatgggagctctagacacccttagacatcttggtttcaggttcattggtcagaactctctccccatccccacagtctatctagatgcttacatcaaaggcaatgcttgcttgacagatttctaaatagcagtagcaacaagatggaaagaagaatggaatgtcccattagaggatatagggccaggacttcagaaagagttcatatatattaatcacatgtcttagaatatcctggagcacctgtcctctcacctacctaaaatacttgattcccaatggtcaatgactttttaaaaaaaggggrggggggggattggtatgtacatagatattgtgggaacgtacaattttttaaaaagtgatgataaagttctataggtaccttcacaaaccactctgttctacttaaatcttaacagttcctggaggaaactttgagattactcttcagagcttactttggtggttggggtgtgttgtatggctttgtgtgtgtgtgtgtgtgtgtgtgtgtgtgtgtgtgtgtgtgtggtttgtttacttttacttatgggcactgatgtattggttactagaaagttcatagataaatttttgtcctattcagtagacaaacatacctgacttgttgacatagagtctaggtgctaacttcattagtcaattcaccttactttcatatctttattttcatttgcctcctttttctttaaattttaggccatcttacagcactttatacatctatgtttatggccttaaatcttttctttttctttttttaagagcaatttgggaagaactaaaataaaattgaaatacaaatcaacattttttgttttatgcaaatgtatgttaaaatattcaaagaataaagaggttttttaaagaatagtaggttctagcacggctcagttaaaatatggtatcacttagtaagaaacactttctaaaaaacaatttatattagccataattaagaaaaaaagggatattgaataagtcaaagagtggtttccagggaagtctttctttgtctggaaagataccataggattttctgcagacagcttactcatttttttcttgattgaaatctggaaaggaaaacttgcaagaaaacattccattctggactcggcagcaggtcaagccaaagtggcaacatttgcagcctggagatcacacagtctgggagctcaaacatttaggcaataaaagctgatggamgccaaaaagccacgccactggcatctggtgtcagggtagctgctgggggagatctggccatggtggtggggcccagccatataaacaagttcagaggtagaactggagctgtgtactgggttgaagcatgtctctcctaaattcatgttttctctagaaccttagactatgaccttatttggaaatagggtctttgcgatgtcatgcattgcttaacattgtggttacattctgagtaatgtgttgttaggtgatttcatcattgtccaaacatcatagagtgtactcacacaaacctagacggtacagtctcctacacacctagaccatatactatatcctattgttcctaggctgcaaacctctacagcctgttactgtactgactactgtaggcaattggggtacaataatctaatgagactataatcatatatttagtgtgccattgaccraaatgtcattatgatgcatgactgtagttaagatgaggtcatactggattaggtaggttctaaatccaatgtgactagtgtcctcataagaggagagaaacagacacaaacacagggaaacaccgggacgatggccatctgaagacagaggcaaacattggagtgatgcaatgacaagccaaggaatgccaaggactgcaaaccattgccagaagctaggaacactcaagtaaggactcctccctagagcctttagaggaagcatggctctgccaaccccttgatctcatacttccagccttcagaactgtgagacaatacatttctattgttttaagctatccagtctgcggcaatttgttatggcagcctaggaaattaacaccaggcatacttcagagcaggacaggtcaagggataaccaaataggtctcctgttactagaattatttacaatgtcagagtagttcttgatgtttacttggccctctcttggcaaaggctctttgtattttcctacactaaaggtctggccaagtaggggttcagattctcttcaagtatagaaactccccccgatttttatgtttgctggccttccaagtaagatttccattgaagaaaatgctccatggctaaaaagctttaaaatccattggtattatcggcagatttggactctatagagcctagtttctaaagtgcttcatagtgccgatctgaaagtgagatagcactagtcctatcagaggattgttcaacctgagactctgcatcagaaggtcaggcagcactgacctgtgtcaggcctggagcaggctctaggaggctgctttcgtgatgagttcctttttgttcaggagaatataaggaagctggtcctattttagaagcaataacagcctttgagtttgctctagggcaattgcaaaatcaagagcccccagggtgctgtactccrgatttctaggtcacagatatccagaccagagttgaccagaaattggccagaatgggttctggggatgtggatgaatttccatttctcatccattcctactccatctccattttatcattctccattcctactccctcaataccaaaattaaaacaaattgttgattactaggtagccttcacattgagtttttcctatggtataacccttgaaaaaaattgatcaaccagaccattacaagaaaaaaaattatggttttactgagttaagccttttactaggttttgcggtccaatttctctgtgtagacatagacttggaaaagccaaaacatctaagcaatgcaaatttaaacaaattagttaaatctgccactgggagtcattatgtcattggcttttaacctggctgcacattaaaatcatctgggggaacccttaaaatgacttctgctcaaagtcatgtgcccaaggttgtgattaatttgtcttcagggtgattcctccccttyaatatttctaaagccactcaggtgacttgcttgtgcaaccaggggtgtaatcctctgatgtggacatgtgactgcaatagaggaaaatgctagagagcagatactctggaatcagtgccacctggacttgaatcccaactctgatatctcataattatgtgaccttgggctaacttagtctcattgtgcctcagtttccttctctgtagaatgggaataataatacctatctcctagggttgttataaagattaaatgagttaatatgggcaaagtacttagaacattgcctggaacatagtacgcaatatataaatattagttgtctgtcgtcctttgctgacatttcccttactggatgtctgaactgaaattgatctcaatagkgtaatattactccaacaagttatattaacttcctgtgactgctgtaataaattaccacaaagtggcttaaaacaaaataaatcttactcttactattctgaaggccagaagtctgaaatcaaggtgtcagcagggccacacttcttctggaagctctgaaggaaaacctgctcctttcctctttcagcttctggtggctattggcattccttggcttgcggtcacatctctctttgcttcatcttcatattacttcctcccctgtgtgtctttcttctcctggtatttcttgtataagaatccatgtgtttgcatctagggcccacgtggattatacaggatgagctgcttttctaaggattcttaatgtagtcacatcttttgccatagaagataatattcacttttttttgctatcataaggtactattcataagttcctggaattaggacatagagatatctttttggggtctaccattcaacccactatacaagatggcataataaaaagtaagcttggatgggaggcatcactgactcattctgtgtttagtggacttcacatttggcctgcacatcccattctctaatatgtctaaaaccattatttacacaacaggtaccatccaaatatacaaacaagtgactatttattgtcaatgtttgtagttacttctcggcaaggacccacagaagtggagcaagtgctcagaggactggttggcccaatggcctttggcatatagagagctccaacaaggaaaggcttcctggtggttttgctccaaagagaacaattttttgagaaactctattttgtgctaaaatgtgtacccaaaatctcaccaatgatggctgtttttkattttgttttcattttagagatatgatctcactatattgcccaggctggccttgaactcctgggctcaagagatcttcctactttaccctcccgagtagctaggactacaggctgcatgactacgcctggctaattttgggtttacatttggaaaagtctgatgcttattttaaaagagaacagggtgatgctacattatcaggacatgttttctgtcccaagtgatagaaaaatcaatctgaataggcttaagtgaaaccctaatttattaactctcataactggaaaattccagcttcaggtccagatcaatgcagtggttccaaagatactatcaggacctggtttctttctccagctcttggctctacttttgctggctgtagtttcagaaaggccgtccttaggtactggcaagacaactgtactaagacctacattctctcaggttcaaggcacatgaaaataaacagtcctagaaaaaaatgtaagcaaaaccttaccgagatttgttgggttgaatactcatgcctgagacaaccaatgtgatagcaccccttcctgttctgtttggccgaggaccttggaaaggatgacccctcttaatacatgggctaagactgtggaaagaggtaggtctgttctgaagaaccagtgtaggtaccatcagaagggagaatgaatattgggtggcaaatacaacagatgaccactgtagatgcaattaggtccttggactaaaatgtctgaaatccaaacctgggttttcttgagcgacatgtgggatttttttttttttctagttgtgtgtgttggtcacaatttccctttccacttggaaataagtgagttattttgaagcagaagacccacatttaaattccatctctgctgcctctttgtagctgtgtggccttgggcacattaccttatgtctgtaagctttaaattcttcactggcctggcggtaacacacacacacacatmcacacacacacacacacacacacacacacacacacacacacacgatcaggatagaggccatcttaccaggactattcatcaccagggcacataaacagaataagcctacatgaacacagtctgattgataccgaagaaccatctgtccctacatatttttcatggtcctgaaacatgttggaaatttctaccatttgagtaatggaaggmatgtttaaagcaacatgtttccagagagccaggtgaaaaatgcaaattgatgccagggaaaagcaaaatgaaatcctgcatcactgactactccttatccgccaccttagaagggatgagccaaagtcaccttgtgtgatcattctcaacatgcaaggcaaccatcaagagacttcaggcaaaatgatctttctgtttttccacatttgttttaggattcttctctaactgcttctcctgaggcagtgttccctggggatatccaataccacagggaatgtccatattgaaaaactatacctagagctcttctttctccaagttgtctccagttgcaaaaatgacctcttcatctccgtaatcacagtgctcattttcacagtggagttgctattaggtagggcaagtaccatctgattatgawttgattaaagcattcatattaagcatgtgtgagtgacaggctcaacttttttttcagggagttagtgtttatcttcaatcttctagattgaggtaagacattttttgagaaagatacccgggtctttttccctttctcctagatcggttgcaagtgtactcacaacagatgttatgtggtattctacttctaaaagactgttggccgtaggttttagctatcacttggaagataacaagtagtagaattatccttcctgttatgggtaggaaggaattcctacggataggaattatctcaagatccctcacagatgtgcactatcatgctccaaaaggtttatttttcctagaaattgactagccttcaagtcttttcagttctcttatcaaaacttactactcctttgtccaaaccctttactattcctttgtccaaacctccgtaacccctgttacagcagccacagggagctaatataccttgttggagttatattagaccattgaaatcaattttagttcagacatccagtaagggaaatctcagcaaaggaccacagacagctaatatttatatattgcttactatgcttactattcctttgtccaaactcctcaaatatccttcctttagattgcagagtagtattctgtggtgtggacctacctcagttgaattggcagttttatttttcttcagctgtttgaatgtgtcattccactgtcttctggtgtgtaaggcttcttatgagaaatctgatggtattattgatgtgtccttgtatgtgacgtgtcacatttctcttgctgccttcgacaatttctttgtctctgtattttggcaatttgattgtaatgtgtcttggtctagatttctttatattcatcctatttgtggtgctttcagcttcatgaatctgagtgttcatttcccttctggaatttgagaaattttcagtgattgtttctttaaataagctttttttcctattgtctctctgctttccttctagaatcaccataatgtatatatttgttgtcttgatgatgtctcatatgtcccttaggctttcttaactctttcattcttttttcttttgcacttataactggataatttcaaataacttgtctttgagttcactgattccttcttaggtttgatcaattctgtgtttgaagctttctattgattgtttttctttcagcaattagattcctcagatgcagaatttgtctggttctttgtatagttcctatctktttactgagaatctcatttttcaggtattactttcctgatttcctttggttgttcatatgtttcctctcgtaactcattaaacttctttatgataagtattttgaattctttgtcaggcatctaaaagatctccacttctgtagggttggttgctggagatttgttttttcctttgattgtgtcatgtttcccagattttttatgtttcttgtagctttgccttggtgtctgcacatttgaaaaaacagccatctctcccagtttttatggagtggtgttgacagttaaagaccttcatcaattagcccagctagagatttggagagcctctcacatagcaagctgactgcctcttttcctttgttcttagctgcccccatcaaactatactcattctgtcagtcctttgggttgagtggaacagggactggcattcttctggcaatgtagtgaaagaccaagaggttggaggtatacaccactcttctctcttcttggtgagatgcctaggttctgcaatttctcccaatctcacagagctctgctatcctgtaacaatctgtttacgccctttccattgttgagttgaccgaggggtccaaactatggcagtactgtcaatgttccatgtggggcaagatagaaactgtccccttggacaattcactgaaagactgggatgccggatggtcattccacttctcttcccctcctaatgagagaagtgtgggttgaggcaatatcccttggcattgatctgtgctggctttggggagaggctgacataggtaaagtgtaattgctcttcttatttgttttaatgtggctgttcttcattttgtgctcatctaggatgcttgcaacttctcataaaagtagtctcacaaaggtattttggtgtgtatattattgttagcttgatgtttctgtggaataatgaggtgagggaccatttattctaccatcttgctgatatcactcccctgaagtgcaaaagttttaaattttgatgaagtccaatttatgagttttccttttatggatggtgcttttggtgtcaagtctgagacctctttgcttagtcctagatcctgaggattgtctcctgactgaaaggctaattttcctccattgatttgcttctccacctttataaaaaatcwtttgagcctatttttatggctctatttctgggtcctatattctgttttgtcaatctatgtgtctatcccaccaccaacagcacatagtcttgatcactataactatttaataagtcttaaatctgataggaactctgactttttttttccaattattttagttatccaagttcctttgactttcygtatacagatggtccctgaaattcaacagttctacttaaaactttttgactatatgaaggtatgaaagcaaaatgcattcagtagaaaccatacrcagtgtccacacactgttctgtttttcacttttagcacagtactattaaataaattgcatgacatattcaacactttattataaaataggctttgtgctagattattttgctgaactgtaggttaatgtaagtgttctgagtaagtttaaggtaaagcaagctaagctgttatatttggtgggttagttgtattaaatgtattttcaacttctgatatattgaaaacaatggttttatcaggaagtaatctcattgtaagttgaggagcatgtgtacattttagaattatcttgtctatattttttaaaaatttctgggatgtaataaaaattgcattgtcattttgggggagaattaatatccttgctatattgagtcttttaatccatgaacatgatatgtcaccatttaaaaaagatctttaatttattttattaattctttggagttttcactatagaacccttgtacatgtttggttagatttacaacaaaatatggtagttttggggtcatcgtaaatttggtgatatttttaaatttcagtgtcaacatattcattagtagcaaatagaaatttaattgtgtattttgtatcctgcaaattcactgaaataatctattagaagtgaggggtttttttctgtatatttttggggatttcccacatagataatcatgtgatttgcaaatgacttttatttctccttttctaatctataaatttttttcttaccttattacactgactagaatttctagcatgttgttgaataaaagtagtaagaatgcacatctttgtcttgttcacgatcttaaggaaaaaacattcagttactgactgttcgatataatgttagctgtagatgttccttatcaagttcaggaagttttcctctactcttattttctatttcttataattttatcattaatagaaattgaattttataaaatttttaaatgattgatataatcaggttatttctctttttttattctgttaataaggtgggttacatcaattgatttttaagtataccagccttgcatctctgaactatatctccagttggtcatgctatataattcttcatatagaattactgaattctgtttgttaaatgtttttgcatcaatttttatggggactagtagcctgtaatttttttcttgttcttctttgcactgtctttatctggtttatctttaccttttttttttttggattagggtaatacaagctttataaaatgaattgagaagctcttctattttttggaagaaatcacatagaattggtattaattacttaaatgtttggtagaattctgcagtaaagccatctggacaaggatatctctattttggggatattgaaaattaagaaataaattacctagtttattttttaaagtggttacaaaaacaaagatgaatgtagtttttaatttaccttgagacttggtctttgatccatgaattatttaaaagtatgctgtttagtttctaagttttggagaatttcttgttattattatgtctgatctctgttttgtttctattatggccaggtgacatattctgtataattttactttttaaaaatttgtctaggattgccttatgatataagatgtggtctactgtggtatatatcccatggccacttgaaaagaatgtgcattctgctgttgtttgatgctgtgtaatagaaatgttgattatatcttgttggttgatagtgttgttgagttcttttatatctttgctgattttctagttttcctagttttctggttttcctatctatggtttagaaatgggtgttgaagccttcagctttaatagtagatctatttatttttccttctggttttgcttcatataatttgccagtttgttgcttgatgcacacacatttaagacttctatatcttcatggttaacttaccattttatcattatataatgtccctctctaattctggtaattttgtttgctcagagtctactttatctgaaattagtatagtaactctacttcatttttacttttaacatttattattttttattgtggcaaaatacacataatagaacttaacatttgaaccattttgagtgacattaaatacattcttaatgttgtgcaaccatcacttctatttagctcatgactctttatcttataaaactgaaactctgtacctagtaagaaaataattcacgcctgtaatcccagcactttggaaggccgaggcgggtggaccatgaggtcaggagattgagaccaacctggctaatatggtgaaaccccctctctactaaaaatacaaaaaattagactggtgtggtggtgggcacctatagtcccagctacttgggaggctgaggcagcagaatcgcttggacctgggaggcggcggttgcagtgagccgagattgtgccactgcaccccagcctgggtgacagagtgagactccatcttaaataataataataataataataataataataataataataataataataataattccctctacttccagcccctggaagccaccattctactttctgtttctatgcttttgactacttttaactacctcatataagtgaatcatatggaatttgtcttctcgtgactggcttatttcacttagcacattgctctcaggkttcatccatgttatagtacgtgttagaattttcttcctttataaagccattgtaagtatataccacattttgcttatccatttattcatctgtcaatagacacttgattgcttccacattttagctattgtgaataatgcttctatcaatgtgtgcacaaatattgcttcaagaccctgttttcagttcttttagatgcatattcagaagtrgatttgctatgtcatgtagtaattctatttttaatttttgagtaaccaccatattgttttcctcagtggctgcaccattttacatttctactatcagggcacaagtgttccagtttctccacatctttgccaagacttgttattttttgttttcttaatagtagccatcttaattggtttggttggagatggtatctcattgtagttttgattttaatttccctaaagattagtgatgttgagcatcttttcaggttcttatgggccatttgcatagcttctttggagagacatttattcgagtccattgcccaattttttgttgttgttgttgagttttaggagtgctttatatattctggatgtcaatctcttgtcagatatatgctttgcaaatactttctcccattctgtgggttgcccttttcctctattaatagtgtctttgatgtacaattttaaagattctccatgaagttcagtttttctgttttttcttttgttggctgcacctttggtagcatatccaagaaatcactgccagatacagtatcatgatgcttttgtcctacgttttcttttaagaattttatagtttttttcttatrtttaggtctttgatcaattttgagttaatttttctatatagtattaggtaagggtctaatttatttattttgcatatggatatccagttttcccagcatgatttgctgaaaagactgttctttctccactgaatggtcttgacatctgttttaatcagggttcttcagagagacagaattaataggagatatatatctatatctatatctgtatctatctaactatatctatatctatctatctatctatctatgtagagagagrcgggggagatataagaaaggatttattaggggaattgactcacttgattatgtaggctgagaagtttcataacagatcatctgtaagctggagtgccagggaagctggtagcatggctcattccaagtctgatggccttagaaccatggaagccaatgttgcaattctcagtccaggactgaaagcccgagagcctggagaattgctggtgcaagtcctaaagtccaaagaccagagaatctgaacttgtctcatgatacaaatataatctaccatggtatatagcccatgtacacttgaaaagggtagaagaaatgaattctggctccagaagacagatcaagaatttgtccttcctttacatttttattccatcacccacattgagggcagatcttctccacccagtccaccaactcaaatgccaatctcttccagaaacaccctcacagatgcacctggggtagcccaatcattagartcaaatgctaaatcacttgggtttcccttttacagaagggagacatgatcagtttctactgaagcattgrgaataatttgtactttatcagctgctgggtatcccttaatccagtcaaggtcacatccaaaatcaaccatcatagcacccttgtcaaaaatcatttaaccatatatattagggtttatttctggactctgtattgtatttcacaggtctatgtgccttttagacttttatttttatttttattttattttattttattttattttttgagatggagtttcactcttgttgcccaggctggagtgcaatggcgccatctcggctcaccacaacctctgcctcccaggttcaagtgattctcctgcttcaccctgcctagtaactgggattacaggcatgtgccaccacgcctggctacttttttgtatttttagtagagacagggtttctccatgttggtcaggctggtcttgaactcctgacctcaggtgatccgccctccttggcctcccaaagtgctgggattacaggtgtgagccactgtgcccagcctatttttattttttttaactttaaaataaagttgagggggcacatgtacaggtttattacatgggtaagttgcacgttgctgaggtgtggtgtacaaacgatcccatcacccagttagtgagcattgtagccaactggtagtttttcagcccttagccccctctcacccttcccactttattagtccccagtgtctgttctttttgtctttatgttcaagtgtactcaacgtttagctcctacttataagtgagaatgtgcagtatttgttttctgttcctgtattaatttgctttggataaaggcctctagctgcatccatgttgctgcaaaggacataatttaattttttatggctgcatagtattccaagatgtatatgtaacatattttctttatccagtccatcattaatgggcatctaggtagattgcatgtctttgtctttataggcttttattgtctatatgccagtactatattgctttgattactatagtttttagtaagatttgaaatcaggaaatgagagtcctcaatattttttctcctttttcaaaattgttttggctttttgatgtctcttgagattccatttgaattttatagtggactgttttatttctgaaaaaaaaaagtcattggaattttgatagggattgtattgagtcaatagattgtgttggtagtatggacatttgaaaaatattgtcttccagtccatgaacatggaatgttttccatttttatattcttytttaacttctttcagcaatattttataattttttactgtacaagtctttcacgtctttagttaattcctaagtattttatttgttttgatgctatcgtaaatgagactttcttaatatccttttcatattgtttattgtaagtgtatagaaatgcaactgatttttgtgtgtcaactctctatcctgctactttgcttaattcgtctattaacagttttttaaaaatgtatgtggaatcgttagagtgttctagacacatgatcatatcatctgtaagcagagataattttagttccttctttctgatttgtatctctttgatttcttttccttgtctaattgctctggctaaaacttctagcactatgttgaatagaaatggcaaaagcagcacccttgccttgttcctgattttaaaagaagagctttcatctttgagtacgtttgctttgggtttttaatatacagattttattatgttgaggaagttgccttccattctcagtttggttggtgcttttatcatgaaagagtgaatttttcaaatgctttttctgcatcaattaattgaccacgtgttttaccctctgtaagcctgacaacgctatggattacactgattgatttttgtattttgagttatccttgcattctagaattaagtcttacttgatcatggtctataattctgtttatatgctgctcaatttggtttgctagtattttgtttaaaaaattgctttgatgttcataaaaaatactgctctataattttcttttctgatagtgtctgtgtctaaatttggtgtcagaataatgctgacctcatagaataagtcaggaagtgttctctctcctcttcattttttttttggaaaagtttgagaacaattggggttagttctttaaatggtagaagtatttctactattggtagaattcaccagtgaaactgttagatcaagggctttttttttcattatgagattttgatttttgattacttatgtaatctccttactagttataagtcttttcaaattttctatttctttatgatttagtcttggtaggtttagtatttctaggaatctgaactttttcatgtaggttatccaattttggggggtacaattgttcatagtgctgtcttagaattctttttattcccatagaataagtagtaatgtcccacttttatttatgattttagtaatatgagtcttgtctctatttttcttagtcaatctaagtgtagaattgtcatttttaaaaaaaatttttaaagaaggagcatttggttttattggttttacccttgtttttctattcttgatttctttgatctttgttctaatcttaattattccttctttctggtagctttgggtttagcttattcttttctagctccttaagttgtaaagttagttggctgatataggatcttccttgtttttaatataatcatttgtagtttcaaatttcatgcttaacactacttttgctgcatcctataagttttagtatgttatgttgtcattttcattcatatctaagtattttctaatttccctttgctttctcttttgatccattaatttttttaaagaatgtgttttaaaattttcacatatttatagatttttcagttttacttttgttattgatttctaactttatcctgttgtggtcagagttgttttgtatatttctgttagatctagttggtttattgtgttaagttctctatgtcattacttatattctgtctagttattctattcatttttgacagtgtggtattgaattctttaactattattgcagaaatgtctctttttacttcaattctgaagttttcactgtctttattttgatggtctgtcattaggtgcataaatgctcataagtcttctatcttcttgctatactgaaccttttaagattaagtactttttttgtttcttgtaaccatttttaaaaaaatttaaagtccattttgcctgttagtacagccacatctgctcttttttcatttccatttgcatgaaatgtcatcttccatttttccactttcaatttatttgtgtctttggagctaaagtgagtctcttgtaracagcatatatttggatcatttaaaaaatccattctgctcatctatattggttgaagagtttaatacattttcatgtatgctattactgaaaaggaggaacttacttctataatttttatatttgttttctctacaccgtataactccccatcccttgttcccttttgtatatattctatagctattttctttgcagttaccattggaattacatttaacatcctaaatttataacattctaacttataaaccagcttaatttcaataacataaaactctgctactttaacagctccttcccatctctctttgattgttaatgtcacaaaattgcaactttatatatcatgtgtcacaaaacataaataattccttgaaatgcattaaactcttctatggaaaaaataatgagttagaaaccatagtttcagtgatattaacttttagactaataattgtttttttaaaaagtattagtttcttaaatcatgtacagaacacaaagtcaagaaacattgttataatmataccaccttttacaatgtccctatgtttaccttcattgatatttttatttctttatatagattctagttactgtatagtatgctttcattttaacctgcaggactccctttaacagttttggcatggcagatgtagggcagcaagctatctcagcttttgtttagctgggaatgtcttaagtttctcctcactttcaagttttgccagatatggtgttcttgcttgacagtttcttttttatattagcactttgaaaatatcagcccactgccttcttatctctaaaatttctgatgagaaatttgtagataatcttattgcagatgcttggtatgtgacaagtcatttctatctcttgctgctttcaagattttctctttgcctttgtatttggaaagtttgattataatgtatatccatgtgggtatctatgaattcatcttacttggagttaattgagcttcttggaggtttatgttcatgtcttttttcaaattcgaagaatttttcaccattatttcttccyrtattctctctactcctttctttctctctgcgttgtctgggactctcatggtgtgtatgttgagccccttgatgatgtctcacaggtctcttgggctctgctcacttttcttcaattttgttttctttttgttcctcagacttgatgatttccattgccttatctttgagttctctgattctttcttttgcctactcatatcttccctcaaagccctctagtaaatttttcatttctgttattttaatttttagctccagatgttctttttaggttttcaaaatctttatttgtattgtcattttgttttatacattgttttcttgacttcatccacatktacttttagtttatttatttatttatttattgagacaggttcttgctctgtcatccaggctgtagtacatggttcagttagctcactgcagcctcaacctccttggctcaggtgatccttctgccttagcctcttgagtagctaggactacaggtgtgtgccatccatgcctggataaataaataaataaatttaatagagatgaggtctcactatgttgcctaggcttttaaattttattttttgggtatgtagtaggtgtatatattcatgaggtacatgaagtattttgatacaggcatgcagtgcataataatcacttctaagatacaaaataaagccctctttactctttgctttcctttccttaagcagatggtgggagtaaattttgttgtgagttgtgttgcctggtgttgcaggaggaatggcacaagcacttccttagccaccctggctggtgtccaatgttcactgaytctaagcccagcacagcactaggacttgcccaggaattgcagtccttgtggcctagactgcctctcaagtttgtttaggatcccagagcacttaagcccatggtggtaagtcttgtgaaaattcaagttccarctgctgggatgggtgattcccctctggctagggctgatctatatgctccctgtgtgtgttggcattggctgagtttagcccagctttactttccattgtgacagggcagcattgagttcaatgcagagccccacaatcactgtactgtccatttcccaggtttacagattgtctctctgtgctatgtggctgctgccagagggataggggaggggcatcattggcaattcaagactatgtttcttaccttcttcagtgcctctttcagcaatatgaagttaaaaccaagtactgtgattgcttatctgatttyctgtttttacgaaggtgctttttgtgtgtgtagatagttgttaaatwggtcttcctgcagtggggatcattgttgcargkttcmgtttggccatcttgctccaccctccctcttttccagttcttaaagtatcttcaagacagttattttaaagtcttttttgagtagatctgctgttaggtctttttcaggggcagtttctgttgactattttttcctttgaatgggctatattttcctcttttttttttgaatgccttgtgtttttttttgttgaaagttgggtatttcaatttaatgatgtggtaactctgggatgcagactcttctttttcctcaaggttgtttgctttttgttattgttttgtttgtttataaaaattgctttagtctgtctctgtgccaaggatcagcctgaggtgtaaacataaggtctttactggtattctctgagcttgcatctttctgtggtcatgtgtgttaactttctaattttccccatatattcagttgtttgtgaatgtccttatctttaatatctggctcccaaaaggagaaaaagagaaaaatgaaaaagggagtggaaatagggtgccagccctttaaatctctggaagtcatttcagctggatgggraggggtttgcaacaatggaataaggtgtaacagcaaagacccaccacctctttgtctgtacctctctgatcagaagcagcaatcatcaatctaagcacatatgcctgatacttagaggacagggtccattttgcttatcctggctccttcaagctgtgtgcaacaagctgctgcaggaatacatgcacagctgcctgccacaggggtggggataggaaatgggtagctgttactgtgctaagagctaaaattgactgagctgaaatcaaagttaactgcaatgtaccatccaaatgtttccctgaaagttgcaagccttcaatagactccagatttccaaaacagttatatcagacatactctgtcagtgcaattattgcctaagcagggagacagattcctcgtgtttcttactcttgcagytccccaggatgctctccctaccttcctttatttaatgtttttatgatacatcttttcccctttttattacgtttaccctgactatattgttatatttgagtgagtttcttgtcatcaacctattgtttggttatgttttagtcaactcttgtcttttaattgtctttagccaactcttgtctttacaatgatttgaattatttacatttattggatttattaatgtattaatgcttaagtctgaaattttattttttgttttatatttgttctctctgtttttctatgtgttttctttttttatgcttcctggtgattatatgaatattttttagaatttcattttgatttatccttagatttgatacaagagaatctctttcatatagttttttagtgattgctcttggtgttaaattatatatgcacaatttttcatagtttaaaagtgttgtcattttaccagtttgagtgtagaaaacatacttcccgtaatgccacatttttcttcctcatttataatataattgtcttaaatattcccccttcgtacatttagaattacataatacagtgtattggcatctattgatttttaaaaattcagtttgagaccttcttggttcttggtatgttaagttattttccattgaaacctggacattttgaaacctgaacgtggaggctccttgttacttttgtgtggcggtggggtttttggctccctgttagtcctccactgatatctgtttggctgagagagttgggaatgtttcctttcacctcccaactggtttccactgacaccatggaatgcagtggaggagggaaggtggccttgttgtcactgggaaacggtgaatattccaactctccactagggcttctctgatactacccaggccagcaggaggatgtggagttaagaaatcctggctccccatgttgtctctactaacactgtggagaagtgggatgagcttgttacttcccagtaggaattcctgactccctacccagccttttctgacacagcctggcaaggggttagagtgcctataacagcttggtaagggggaagcacaggcttctgcacttccatcagactttgctagtggggtgagagtgagccagtttttctgtggtgtttgttataacaaagcaactatattctaaaagtttttgtctttctggtttttccctttttctcattccttggctagagaaagtaagattttgtttggcctttttgatctgtgatggttccattttatggttgccaacttcaatggctctaaatctggaatatatgaggcaaaatgaaaatccaggaacacactgctttgtttttcttcaaatcctaaggtttctagcccatatgccttgttctctccaacttttagaatcttctcatgtttgctttttaaataacgtccagagactcaattatatgtagcaggaggaatgtggaaaagcatctccacttcacacccccctggaagtaaaagttatgatgcatatacagtgagataaaatttgaagctctgcatgcgtatgatgtgtgccacttatagcacatgatagactctctttcattcaaaattcattccaggcctgctgtgtcccaggcactgttcaaggcattgcagatatagtgatgaacaaaatagataacatttctctctttatggtgcatacattcttgtgggaagaggtggacaataaacacagaaagtagaatatgttagtaaaaaatgctactggaaaaagtaaagtagatttatgaggctagtgagtgctggaggcattggaggttatttattttacataaggtggtcagggaagctaacatttgagcagagtggctgcagtgaratggacaaagacaaaagtggtagaagagagcagagatgtagttggggaatcagattgtctagggtcttgaaggcagtcaagaatttgggctttcatttagtcatgaaggaggttttcagagagaagtaatatgatccagtttacagctttattggtctgctatatggagaatagattgcggtggagtaaatgtrgtggtcaaatgaggaggcttttacaaatacccgggagaggtttaatgagagattaaactcagatggaataatggagttagtgagatgtggccagattctgaaaacattttgcagataaagatgacagaaattgctaacagattttatgtggggtgtgagagaatgagagagagagagagatcaaagatggtctaagatctttggcttaagcaattggaagaataaacttggcatttactgagatggggaagaccgagggaagtgcaagtctggggaagaatggggagtcagaggtttgggtttgactgtgttaaaattgaaatatccattaaactaggggcatagtaggaggttgcccacaggagtctgagtttaaggactgcagatatcctgtctggagatatcaatttgggacttgctgtcctatagataattgcttttgtctgttttgcgctgctataactgaatacctgagactgggtaatttacaaagagcagaaatctatttcacacggttctagaggctgggatgtacaaggccaaggtgccagcatctgatggactccttcttggtgtattctcacgtggaggaaggcagaaggtgaaagggcaagaatgaacaaatccactccctcaagtcctatttatagcagcattaatccattcatgttggcagagccctcatgacctaaacacctcctaaaaggccccacctttcagcaccgttgcattggggattaaatttccagcacacaaattttggggaacacattcagattatatgaatgatatttaatgatatgtctagatgtgatcacatagacagagactgtaaataaagaagaaaaagagtcctgagttctgggggcactctcatatttagaggtcaggaggatgaggagaaaccagcaaaggaaaatgagaacagatcagtgaagcagaagaaccaagagagtgtggtgtgctggaagttgagtaaagaaagtgtttccagaaagagggagtgattaatttgtcaaataagaagagagttgtaaattgattcttgggtttgggaatgtgatggtctctggtggccccaccaagatttgtttccatgggaggagggggaaggaggaaagaagtggaggagaagacagagatggtgagcataagcaactctctggagttgctataaaggaaagcaggaaaatggagtagtagatgaacaaggttacagggtcaagaaaggtgtaattactatacagaacagttaaatatatacatggaaactttgtatttatctatagagtttgaatttattttgattgacaatgagtctaaaatttcatatagtgaaaagtcttcaattggcttgataatcttagcaatagcatttatatttgaagaagacttagttaaatatgagttggtctatgcaagatgtgtaattttaaagcttcttttctttggtttaatttggatttgcaatttcagttaaccctttccaatgaatccccccaaatgaatatttacttagcaatgataaaaaaactttatatttacagagtacttatcagtctctctataagaacaaacataaaagaatgaaaatttacattagaggtgtaggaggtaattaaagtgatgtggtcccaaaccagggaaactgagtctcagaccataggtggagcatgggatctgaaggggaaactcacctacaactctacagcaccaattgccagcctcttgggctaatagactctctcccgcttctgtcattgtctttgtctttttctacagtgaaacaagctttgaactatttccagctttccaatagcaaagttattcagattagatgaactttatttgttctccgggacatctagttctccaaagtcttctgtctgtaccatgtgttcaccaaacctccttctttttcctgctgggaaacccaatcagctgcatttcccagcctcccttgcagttgggtggggccaaaagaatgagggtggaatttatgccacttccagcctgaagcatggtcattaagaaaatcttctacacaatcctccttgtcctctctcttcctttgcctgctggatagatgcagaagattccttggaagggcctgggtcctgaatggctgtggagcagaagcttgaatagcatcttactgtggcatgagcaagaaatgagcttttattatgttgatcttttgatactttgtagttgtttgttacagtagtgagcctgccctgattaatacatacttctactgcaagtattacaaaaatacaactttttaaaaaatacctttctgtagcctttcaggatcctttccttctaagaagtcaccttcaggctcccaaagctttcctggagtgtgaatgcaaggagaaacaaatagcaacaatcctgtatcagttactttttcctgcatcatcttatttaatttctgtaggaatccaatgattctcataaaacagtagtccaatgagtccagcctcataatccaataaggttaataattaacctcagtttacagatgaaggagtttgtccaagatcacagagttatgaaatagtgaaatccttcgagcctgacctttttaaccacggagcccttgctctcccactacatcttcactctgttctttttccctctggggaaggaagtaaaactcatgaatctaattcacttatgcacactctggtattagagactcaatttcctttctcttgttgtgtgtatttgtgttttgaaggaggtgagaaacagagaaggtaattatttactgacatgaattgtaggcactgttgtgattgggtggggtgggaggcattctgcagacgacatagtagacctgagtccaggtgtgaaggggagagggagacagcagacagcatttagtttctagggagacagcacaggaaactaacctttctttccccttcagctttttaatacaaataattaaagatcctcatagtccattaactggccaggagagcagatggtagaggtgagaagtttcagcatcctgagaacacttgagcagcctccctgttccaacagaattgtccatattcaagccaagagaggaaagatgtggaactgctgttgccaagggggaaagtgcaggtcttcaataccaccttgatgttttatgtttataaaatttggctcagctgggcgcggtggctcatgcctgtaatcccagcactttgggaggctgaagcaggtggatcacgaggtcaagagttccagaccagcctggccaatatggtgaaactctgtctctactaaaaatacaaaaattagctgggcatggtggcaggtgcctgtagtcccagctgcttgggaggctgaggcaggagaattgcttgaaccctggaggtggaggttgcagtgagccgagatcgtgccactgcactccagcctgggcaacagaatgagactctatctcaaaaaaaaaaaaaaaaattgactcacacataatgcaacacctgtctgcatacttttgccagtcactccataatttaaaatgtgcttcttcataggaagcatcaaattagataatttcatcctcacagcaattttaggaggcaacactcacatatgatccaggtaaaaaaaatggtgactcacatccctgacatgaagcccagggcatttcttagacttcctgtttttgagaaggaaatctaagacaaacctcccagactttgaaggatgggtgttcctatccaaaatgcaactgtgattatctgtgaaatctgcagatcttgtctgctctttcttgtctgcaaaagatcagatgaatgctctggagatgtgtgtggttgtctagcatgagcatgtgcgtgtgcatttgtacatgtgtgtgtgcatgcatatgtgtgtgtgtttttgtgtaagagacaaagaaagaaaaatgaatataaaatttacagaatcaaatatcagttttcaaagcttcaagatccaattgtgtgtataggattatctgccctgtttaggaaagtgttttctggagtggagctccaagtctgtgatgaatgtgccaaactaggggttccttctcggagagtcatcatatccttagtatgccatggcttgaagaaaccccacaatgagtaaatattaggtcttgtctgatgttatagatcccaagcttacttaactatggattctcttttttgagtctatcactcattcacatacagtgacagtacatctttttgaaaatgccaattcaagagtaattagaaaggtttaatgtagaaaactrggattatcagaagacctagattttgctcttactctatcactaataggctttataatttttgataaattatttttatttagttctttttcaagtatttttttctgccttgaaggaaacatttctttaaggatatttattgtacttatttaaaattgttgttctgtcatgataattccactttgcatggtacatgttattcattatttattacataaattatttatatattacatgttgttgattatttcttagtggttgtacttttcaggtatgtaattattttggcctgtgatatacatcctcctggagaagataatttgtattgggttaaggcgaaatggcagagcctggtttttgtaccttctggtgtgagcttaagaaagaggtggggatgagaccatgttcttttttaacagtgaatcctaacctttcctccctgtgtgtcccaggacatttgtgtactcactgctcaatcgagggaggccttatccagctatactcawtstcagagrcactgccttctgcactggaaatggagtccttcraggctactatctgatttactgtgctgaataccctgatgggtggtacacagacatacggtttagcttgggtaagtgaatctgcccacttctcacctacttcccagctaacaacccttcccacaatctacatcgccatggcctctccctactgcaatgacctcgtaatgatcccatcttcccctccctcacctctaccctgatcttttctctatatggtagccagagagattgtttaaacacatatcatgccatttcccatcgcaaaactctccagtagatttcctttactctcaaaataaaatacaaattccttcccactgcctttaaatcctaaatattcttggtcttttcaatttcccaacctcttttcctggctccctgcacctccttttctgtgctccagtgccagtggccttcctgctgtgccacaagctgtcaagcttgtccagccccagtgtttttgtataggactgttccctctgcctagtacaggggtgtccagtcttttggcttccctggaccacattggaaaaagaagaattgccttgggctacacatataattcactaacaccaatgatagctgataagctgaaagaaacattgtttcttaaaacaatgttttaagaaagtgtacgaatttgtgtcaggccacatccaaaactgtcctgggctgcatgtggcccacaggctgygggttggacaagcctggcctagaaggctttgcccccatgtattcatgggggttggttcctcactttatttagttccctaccaatttgcacctcctcaaagggactttccctgaccaccctatctaaaatggttgaagacactgctgtgtgtgctgtcccccttccctccccgctcccctaccatcccctgccccagataccctttcttccaggctaatgatcttttgactaggcaaggtggaaaatccttgttttatatcaaatcaaataaggtgagaatagacttgattgtttcaactaaactgttcttgctttttgcctgacatattttgaaaagcaccaaagtgctttgctgacaggttgggttgggcctctttgtgggacggtgagtgtttctgggctgtaataatgccttttgggatgcaggatctagcatccctgatcctggctgtcctcacctcagaacagggccctttctgtaccagtggatagtgcaygtggagacacctccaggatatgtggctaagtaagataaataaaaatgtgaacagtgtgtgtagtatgctacttttaatgtcagaatgtgtgtgtgtgtgtgtgtgtgtgtgtgtgtgtgtgtgtgaactggcagtgatggaagtcagtttgttagtggccacgcctccaaactagctcacgttatttcatgagagtgggtgtttcagtcaggaatgcgttcagaaaaccatataatagtgacgggaataattcagaattcatagttcttacataacaagtgtcgaagtaggtggcttctgcattcctgtggttgcttactgacaccattaataactcaggcactttgtgtctcccctattcttagcatgtttacctgtggtcctcttattcatcacttcrtggttgcaagatgttgactgtagctcaaggcattacatctggcaatcaagacaggaagaaagacgaagtaggggcaccggtcttgcctgcaccttttatcagaaaagcaaacgatttccaaggaagtcccccmaccaagacttcactttacatcttattggtggaactagctcatgtgaccccctttctcagtgcaacctctgtagtgggggatggcaaaagaaaaggggctggaatcagctgttgagatatgaaacctcgatttgactgtttgtgaatgagctaaaggcttactattatgatccatgcatttgtttgtttatctatttaaatactggacaatggtgctacctcctgctctcctctcttttctaatctgtctccatcagtggtgccactgtgtactttcagcccaagtctaggaaacagcacacccagtgctccccattcaggaccaggactcattgccctccccactttctgccacgtcttaggaccattcttagatttagaaattaaatgcccctcctttcattttagcttagtttgtgaaaaaagcaccacaatctggacacatttaaaaaaaatttctcctttctctcttctttgtcaaggtgtcttcttatttattttgggaatgggaataaacattcatagtgwctatatattgcgccagctcaggaagcctggagaaatcagctacaggattccacaargtaatgtctcccctgcccccagactctcactcttccctggagcctgtcccagggatgatgctatggtagcagatggagaggggacagtgagggcacgaatgatacaatacctctcagcttgctcttgacttcccctgcaaacccagtcccatcacagtacctctgcatttctaatctgaacccagaagctccagagagctaccagagccctcaggaaggtgcgagaccgcaatacccggaaggtgggagagagtgggagatttgagtagggttggaatcggctacctacaccctcattgcagtaggtaaggttgtcatgtacagagggctgatcctttctaggttgcaaatgatgctgaatgcttggccaataaatgtgtcccctccaattgatctagacttatcttgtgagcagttaaggctagaacttgcgtatttcctgccattcatatatacttttaaaggtgtagagaactatatttacttaatcaaaacttaggatgggaggccttacaagcacaagtgcatttttggagataaaggtgagcatgtttgtaatcctaactgctccaaagaaaccagggtatgagattgacaaatatacgcagatgggagcaaatcagtccaagtcatccttcagtaggtttagatgggtatttgtgtaggtccttggcttccaccgtttttgatgtaaatacaaccctttatttacatcaaaaaatttcctcaattatgacatgatgttagtgcacattaatagtcattgattaagaaattaatgacaaagttactatgaattcagtaacagattcaaatgaatttgaatgttgttaatatcctaacagtatctacatcaaacaaaaataatttaggaggttaagatgtgccgtttactgtcttcatagaaaatttataggccctttgctttagatccgtggttcctcccagggcgtagrgaatcacaggttgggaaccactgacgcagtctcatcttcaagaaagattcaactctaaggggctttgattttaaaaacattcactccataactagataaataaagaagagcagagaaagcacttgaaaaccagttgccaagattagtttccaacttttgaattataatagagaatgatttaaaacaaagtatttttatgtaactgtagaaagaacaaaattgtttcggttgaaacatccccagtttaatgtgggtaataaaatttagtgtggatatatttaatatcattagaaatatgctgatttctagatacagtcctgagagaagaaatacctggttggatagaaaatgaaacatttaaaatctagaagccgacttcaccagcctacagcaggacaaatacctgcagctcctactctctgctttaaacatgaacagaggagagtgctttgcagaagggtggggaggggcaaatcccataagagaatctaaattccttctcccgtgagttcagatttttattattttaatgtagtgtgcagtttcacattttgggactgtgaatgtgaacgtgtgtgtgtccaggaaaggagcggggaggtaagaggtggcccaaaaaccttccttaacagaacaaaacaaaaaccagacctcctacacctctcccttatcctacccaaagctagtggtccagcagttgttagagatttggatagagcccgttaagcagttgaggccactcttcgcaactccagaatgttctccaggcaacaggctgttgttgctttgtttccccttctccccaagaggattccaccaaactcctatgactatggagggagcctccagccccacatttgttcttgctgcctttgtgtattttggaacaacacagatgggtttaatgtcaaaatgattcagttgcaatgattgaccttccgattcttctgcacgcaggtggcttgtttacgtatgtttctggagccaatttcctcggtgasatcattraatggatcrgctatgccctggmcacttggtccctccsagcacttgyatttgcatttttctcactttgtttccttgggctgyrarcttttcaccrccataggtaaatttttcaataaaagcggcagcattcacgtagctttcttcttctccaaacaggcttttaasccgcagaggaagattgagaaaccgaagatatttaattttttaagggaaggttgatactataatctgggttagcatattctgacttgctgggcttgtattgaagttggaagttagctggatgagagtagcagtaataaaattttttctaagaacaaacataagtccatgtaaacagaggcaactgaggtgacggccgggaaggtcctgtgcctgtcttgttgaagaaggctgtccagcgagaagtgccttgcaccttcttgggttagctgacccaggctctgtgcccaccaggcaggcttacctggagatgcttagataaagcctcaagaagcggaagaagccgcttccatttccaccttcagtttcatcccctcccaccacatttctggaagtgtgctccagaggtgggaccatggccagcactttccaaagctccacagatatttatttatttatttatttatttatttatttttgagtyggagtctcactctgatgcccaggctgaagtgcaatggggcgatcttgcctcactgcagccttcacctcccaggttcaagtgattctcccacctcagccttccaaatggctgagactacaggcccaccaccatgcccagctaactttttgcatttttagtagagacaagtttcaccatgttggccaggctgtccttgaactcctgacctcaagtgatctgcctgcctcggcctcccaaagggctgggattacaggcaaagccatcacgcctggcctccacagatgttctgaggcacagcaggctagagaaccactgggaaaaagtactatcttggtgactatgtggctgctatttttggcaacaagatttggtgctaacagttcaggtaatcacagagccctggaactccagaaggattatttcccctggaatctctgcaatgccagggtttattttggtactgccttccttccctgacacccaccctctataaatcataaccaaggccaaccctggattctggggaaggtaggacaagaaatcccatgtatggggcaatcttaggactgccctatctgctgggaaatgccagggattgcaggtgtttcagaaccctccctctgaaggtctggcctaaagcttcactaatccactaacctggggtggagtggggacaaaagaattaactaaaagtattgctggaagtgaaaggtaatatattaggttgttatcaggctttaacttgccaagtgtaaatgtcagatcctttccctaaaatggcttttgtggaaagagaaagcctataattactggagactatggatactcaaacagggaatgagtggtcttggaaccaggaccctggggttatgactcaatgcctagttttgaagatttaactaagaatgagttcctttttttctgattagaattgttcgaggacaacagttctgaaatgaatgaagcaacagctmgtgacctattcctaccacctcctagactctgtgaggaggggtggcagagggttcctagcccataaaagagtcataacagttcttaccatttcaggctgggtctgctgcccaccagaggcagagcgggaatgggagaagagaaggcatcactcagcacttggagggtccctgggaaggagggactctactgtgcttggttaggggagggatggtaattccaccagacgtttccagctgctgcaacaacaaaacccaaattgaggcctcatcctgtgatgtcagacctcccagagaagggccagaaggcatagtttttaataggctaacaggactttgtgaaggcttctataaaacaaagccaggcactcacatcagaggcagcacgggcggaggcagcccaccagacttctcaaatcacagtaccgaaaaccagccaccttttgtaacttattatttgccccctaattcaaactaaggtactttaatacagtgtgtcatcttgattatgccttgaggaccgccagcatcaactagttaggaagacagcctggcaacttaagcagacaggcttcttataagatgcattcgtctcctgtggctgctgcaatacattaccacaaactgggcggcttaaaacaacacagatttgtcctttcatagttctggaggctagaattttgaaatcgaggcgtaggcagggccaggcccccgtgacggctctagggaagaattcttccttgcctctttttagcttctgatggtggccggcaacccttggtgttccgtggcttatagctgcatcactctgatctctgcctccgtcttcacatggccttctctcctgtgtgtctctgtctcagtctctttgtctcttctcctcttctttttaggacacagttatattggattaagggcacaccctgctccattatgacctcatcttaattttatctgcaatggtcctagtttcagaaaaaaaaaaattaccctctcagttactgggggttaggacttcaacatatcttttgacgagacaaaattcaacccatgatacatggtgacaatttgctggcattcccaggcctcatgaagggatattttcctgggaacattgctggttctctttgcccatagtctttggttccctgtatttcccagctgaatccaaacaagtacctccttctagatactacatttttttttctggtaggatatacgtaacaaaaattttaccactttagccgtttttaattgtaaaattcagtggcattaggtacattcataatattgcacagccatcaccactaccctctgcctgttacttttcatttcccagcaaaagaagcttcaacatttacaagaaataggctgtgggaaggagaaataagaatcataagtgaccatcgaaatagtcaggcccaaaataactgtaggttgacttgtaacaaagatttggtaagagcaaacctcagctgtcagccactgctccattatatttacaattattcctttcttgtcttttaggttctacctcaagatgtttgaggactaccccaaatctcggaaagcccttattccattcatcttttaaaggaaccaaattaaaaaggagcagagctcccacaatgctgatgaaaactgtcaagctgctgaaactgtaattttcatgatataatagtcccgtatatatgtaatagtaggtctcctggcgttctgccagctggcctggggattctgagtggtgtctgcttagagtttactcctacccttccagggacccctatcctgatccccaactgaagcttcaaaaagccacttttccaaatggcgacagttgcttcttagctattgctctgagaaagtacaaacttctcctatgtctttcaccgggcaatccaagtacatgtggcttcatacccactccctgtcaatgcaggacaactctgtaatcaagaattttttgacttgaaggcagtacttatagaccttattaaaggtatgcattttatacatgtaacagagtagcagaaatttaaactctgaagccacaaagacccagagcaaacccactcccaaatgaaaaccccagtcatggcttcctttttcttggttaattaggaaagatgagaaattattaggtagaccttgaatacaggagccctctcctcatagtgctgaaaagatactgatgcattgacctcatttcaaatttgtgcagtgtcttagttgatgagtgcctctgttttccagaagatttcacaatccccggaaaactggtatggctattcttgaaggccaggttttaataaccacaaacaaaaaggcatgaacctgggtggcttatgagagagtagagaacaacatgaccctggatggctactaagaggatagagaacagttttacaatagacattgcaaactctcatgtttttggaaactrgtggcaatatccaaataatgagtagtgtaaaacaaagagaattaatgatgaggttacatgctgcttgcctccaccagatgtccacaacaatatgaagtacagcagaagccccaagcaactttcctttcctggagcttcttccttgtagttctcaggacctgttcaagaaggtgtctcctaggggcagcctgaatgcctccctcaaaggacctgcaggcagagactgaaaattgcagacagaggggcacgtctgggcagaaaacctgttttgtttggctcagacatatagttttttttttttttacaaagtttcaaaaacttaaaaatcaggagattccttcataaaactctagcattctagtttcatttaaaaagttggaggatctgaacatacagagcccacatttccacaccagaactggaactacgtagctagtaagcatttgagtttgcaaactcttgtgaaggggtcaccccagcatgagtgctgagatatggactctctaaggaaggggccgaacgcttgtaattggaatacatggaaatatttgtcttctcaggcctatgtttgcggaatgcattgtcaatatttagcaaactgttttgacaaatgagcaccagtggtactaagcacagaaactcactatataagtcacataggaaacttgaaaggtctgaggatgatgtagattactgaaaaatrcaaattgcaatcatataaataagtgtttttgttgttcattaaatacctttaaatcatggatgttaagcagttttgtttgaattaaaatatcctgggacttctggagattttcacaaggtattggggtgtgcttccctgtcccgcctgtccctcattcccattcaccctgtctgtagtgtcgtttcctttcttctcttctctcttcatgaaattaggggctgtgtgctggaaataaagaagtatgacttatacagcctctcagccacaattcagaactacaaggaagtacaataaaggtgcaggaaaacgtcatgaggttagatgccactcctggtgctgaggaatacacagggggaatgaacacacttggtgaagtaaatcttcaggtgtagcttgagctctgtgacataaaagacttccagttctctccatgacattgaaaactaccttgcttaagtcctttattttactaccatgtaaaacatccaggccggtccttgagatgaaataaatatacaataaatggcagtactcagtctcaggacaaaaccgccatttggcaatttcactttttgccacaagagggcgctttctaaaatagtatttagtccaaccttgacttaattaggtccaaccccagtcctgttgcctgatcgtggacctttcaagttagcatgatcgtggaacttcttaatctgaatatagggtagagtagcgtgaactctatgaaagctgaaaccttcccttgataattcaggtattctcagtgttctagggctgttgtgttcaatgacagtttgtcattgtttagggctaggatatgtatgtggattaaatacagtaaaggtctgaacatgtgctcatctctaaacatatttcttcccacttttaaaaatagggtgcaacaaaattatagttaattgaggtttccatggactgttttttggctaaaataatctaacagtgtcctagctcacaagatactctatcttggtcttgctgaagctttcacggaagaggcgttttcctgccaaccttgaagaaaatgttgagttttgtttgtttttcagaatttagacttaaagagctgaagcagacctcagacatcagctattcctaccacttcacattataggtagtgacactgagacccacagagttaaaaggcctcctcacagctggtacagagctggtcagagcagccatctcattttgtccctttgagggtcagatgtatgcttcttctgcttaaggcacagcctttagggctgccatctggatttctacagagctcatgcaggagaaaaatagccagagcttaagtgctgttgcatagttcagtttatacacctattgtcccatgcctgtttgtgtgtgaggcttccctcgctccgtgggagcaccaggctcatgccctttcataaacctatttgacagaatagagagttttccctcattggtgtagtcaagacaacatgtgtgttcagcatggaaaaaaggtttcagrtcataaacccccttatccctaatgcttactttcataaagaacaacagtggctccactgtattctaaaaggaaaaaggagctctaatgagaaatacgcaattaaacagctatttaggcggcttagaccctttcaggaacaaataaataaatccgtggttttacaaccctgaagtttgataatagctctcttggatttttgtggttacctcatggcaatctcactaagaagcaggggagcaagctcttggcacatgaaggaataggctcatgaagattcatttcttttcccgcttggccttttggttctctaataagctgtgagctgaggtccatgcagggaaaacaaggagggtaacggcaaatgtaaagtgaatttttctggagaaggatgctgattattttatagcatctacactatcctatgatgaaagaggcatagagccgggtggcaatgtgagttcttgggtgatttaataagccatcgagtggatttaatttctaagtaagacatttgtttattctttgtacaagtccatggagttgtgatcttaaagagttctgtgttatttgcattgtgcctcatttctccccatcaaccttagcttgagatttggatgaataaaataaataactggagaaggttaaagtatgcaccaagctgtgttagtttctttagtcctgtctttttgggttgagggtttggttttgctcaatgcagtaacaatctagattctttattggagggatagcgaatatcccttccgacatggcaagctggctgggaggaggaggacaacagagaaagtggaggaaggaggggagtaatgagcgagggtctaagggagggttggcaatggaaggcccttgagagagaggggcctcccactgacagagtgggcttcctccctttcctgtgtccaggctgcacaagcctggtcccttctttatcctcccaggaaaagacctccctctgacagagagaataaacacttgttagagctccatttcataaaagaagaagctgacttttaaaaaacacaagccatttggctgtgcttcaccataaataattgtatttctgtctgctcacctcgtaaagatagttttagttctgcgtagtagtgacattgtgagaaagaggtgaagtaattgctcttagagcgtgtggcagcatccaagtcggctgaggccaatgggaagatgggagcatccagaagaataagcaactgccagggttccccttttcaaggcctttgttttcctttactccagacgcactccccaaaaaaggatccttccttatagagaagcgtttttacagtgttgactagaaagcaataccgtaaaatcaattaaattttgtcaatgtattagtgctttcatttgttacaagttgcctttcagatactatttcattaaaataattctttatgatggtttataacaggataagctctgaacagataagtaagtgaggggaagtagaaataggagtaaaaagtaaaataaagccagagataaagttaaaatgcaaaaatgcccttggaagatcatgtacagtggctaaatctaaacataaattgggtcctgagtctccaaagtacagaaggaaattaccagttgctaaatccacaacattcacaaaagaaaaacaacttgaccagggaaacacaactattaccggtactgagactcatgataaatttctacactgtgtgatgtggggaactatgttcatgagagcatctttacaataaatgcaggggtcactttgtgcagcttcttataatgtctttccacaaggacaacattctaatgcgcagctcaattctttagaagcaaaggggatgaggaggttttttttccacttagggtgtagaaagccaccagataaccattcctactctaaaaatgagaaaaaaccagatagtatataagattataactttttgagccttttaatgaactgagataggagagcaaccagaagaactgaatttcagaggaaacacacaaaccgtttcactttcagcggagtatgggaggaagaggtaatggccataagagtgggaaagaagaaaacaacagaaatttcaatgaattatcaatagctgagtggaacctagcatgagattagaatccctgggagactcagacacttggctgaacaagcatccagatctgccccaggatgaggagtttcctgggacacaggactttctgtgctcaaactggaaaagtcctaggcagaccaggatgacctggtcaccttagtctggttgccaggtcttttacccagacctccacctggagcttatgaggtgggttggggacagggaaggggatctgagagggcccttctttggtggtgcatagttacaaaagcccactgtattagttcgttttcatgctgctgataaagacatacctgaaactgggaacaaaaagaggtttaattggacttacagttccacatggctggggaggcctcagaatcatggctgtggaaagagaaaaatgaggaaaaagcaaaagcggaaatccctgataaacccatcagatctcgtgagacttattcactatcacgagaatagcatgggaaagaccagcccccatgattcaattacctgcccctgggtccctcctacaacatgtgggaattctgggagatacaattcaagttgagatttaggtggggacacagccaaaccatatcatcccacccctggcccctccaaatctcatgtcctcacatttcaaaaccaatcataccttcccaacagtcccccaaagtgttaattcatttcagcattaacccaaagtccacagtccaaatactcatttgagacaaagcaagtcccttctacctaggagcctgtaaaatcaaaagaaagctagttacttcctagatacaatgtgggtacaggtattcggtaaatacagccattctgaatgggagaaattggccaaaacaaaggggttacagggcccatgcaagtccagaatccagcaggtcagtcaaattttaaagctccaaaatgatctccgttgactccaggtctcgcatccaggtaacgctgatgcaagaggtgggttcccatggtcttgggcagctccacccctgtggctttgcagggtacagcctcctttccggctgacttcacgagctggtgttgagtatctgtggcttttccaggcacgtggtgcaagctgttggtggatctaaaattctgggatctggagaacagtggccctcttctcacagctccactaggcagtgccccagtagggactctgtgtgggtctttgaccccacatttcccttccacactgccctatcagaggttctccataagagccctgcccctgcagcaaacttgcctgggcatccaggtgtttccatacatcttctgaaatctatgcagaggttcccaaacctcagttcttggcttctgtgcacctgcaggctcaacatcacatggaaggtgccaaggcttggagtttttaccctctaaggccacattctgagctgtacattggcccctttcagccatggttggagcagctggaacacaggacaccaagtccctaggctgcacacagtgtagggaccctgggcccagcccttgaagccactttttcctcctgggcctccaggcctgtgatgggaggagctgctgtgaaggtctgtgacgtggcctagagacattttccccatggtcttggggattaacattaggctccttgctatttatgaaaatttctacagctggcttgaatatctccccagaaaatgggtttttcttttctatcacattgtcaggctgcaaattttctaaacttttgtgctctgcatcctttgtaaaactgaatgcctttaatagtacccaagtcatctcttgaatgccttgttgcttagaaatttcttccaccagatatcctaaatcatctttctcaagttccacaaatctctaggacgggggcaaaatgcctccagtctctttgctaaaacataacaagagtcacctttagtctagttcccaataagtttctcatctccatctgagaccaccccagcctggaccttattgtccacattgctatcagcattttgggcaaagccattcaacaagtttttaggaggttccaaactttcccacattttcctgtcttcttctgagccctccaaactgttccaacctctgcctgttacccagttccaattccacatttttgggtatcttttcagcaatgctccactctactgctactaatttactgtatgagttcattttcacactgctgataaagacatacctgaaagtgggaacaaaaagaggtttaattggacttacagttatatatggctagggaggcctcagaatcatggtggggggtgaaaggcattccttacatggtggtggcaagagacaaatgagaatatcactatcacgagaatagcacgggaaagactggcccccatgattcaattacctcccccgggtccctcacacagcacgtgggaattctgaaagatacaattcaagttgaga

SEQ ID NO: 94959 - DNA, 19715 bp, Homo sapiens
cactccagagcctgggtgacagagcaaaattcctggggagagtgaagttatgatatgctgtaaatatatggatgagccttgaagacaatatgctaagcaaaataagccagagatgaagggccaaatactgtataattacactttatgaggtacctaaagtagtcaaattcagagacaggaagtggaatagtggttgccaggggctggtggcagtggggaataaggagttattgtttaatgttgtgggaagtcaaggaccccgaatggagggaccggctggagccgcggcagaggaacataaattgtgaagatttcatcttaatatggacatttatcagttcccaaataatacttttataatttcttatgcctgtctttaatatcttaatcctgttatgttcgtaagctgaggatgtacataacctcaggaccactgtgataattgtgttaactgtacaaattgattgtaaaacatgtgtttgaacaatacgaaatcagtgcaccttgaaaaagaacagaataacagcgatttttatggaacaagggaagacaaccataaggtctgacagcctgcggagtcgggccaaaagagccatatttttcttcttgcagagagcctacaaacggacgtgcaagtaggagagatatcactaaattattttcctagtaaggaatattaatattaataccctgggaaaggaatgcattcctggcgggaggtctataaacggccgctctgggaatgtctgtcttgtgccgttgagataaggactgagatacgccctggtctcctgcagaaccctcaggcttactagggttgggaaaactccaccctggtaaatttgtggtcagactggttctctgctctccaaccccgttttctgttgtttaagatgtttatcaagaaaatacatgcaccgctgaacacaacccttatcagtggttctgcttttgccctttgccttgtgatctttgttggacctttgtcagtggttctgcttttgccctttgtcctattccctcagaagcatgtgatctttgttagacccttattagtggttctgcttttgccttttgaagcatacgatctttgtacccactccctgttcttacccccgctccccttttgaaacccttaataaaaacttgctggtctgagactcaggtgggcatcacggtcctaccaatatgtgatgtcacccccagcggcccaggtgtaaaattcctctctttgtactgtctctctttatttgtcagccggccgactcttatagaaaatagaaggaacctacgttgaaatattgggggcgagttcccccaatagtttaatgggtaaagactttcattgtacaatgatgtaaaaattctgggccagacgcagtggctcacgcctataatcccagcactttgggaggctgaggcaggccgatcacttggggtcaggagtttgagaccagcttggccaacacagtgaaatcccatctctactaaaaatagaaaaattagctgggtgtggtggtgcgtgcctgtagtcccagctactcgggaggctgaggtaggagactcacttgaacccgggaggtggaggttgcagtgagctgagatcgcgccactgcactccagcctgggggatagagcgagactccaaaagttctggaaatggataatggtgatagttgtacaacaatgtaatgtacttaatatcattgatttgtacacttaaaaatggttaaaatgggcttgttccagcagctcatgcctgtaattctagcgctttgggaggccaaggcaggagggtcacttgagaccagagttcgagaccagtctgggcaacatagcaagaccctgtctctaaaaataaaaaaataaaaaaataaatggttaaaatgaggccatgcatgcctgtaatctcaccgctttgggaagatgaggcggtagggtcacttgtttgggaagaggaggtgggaggatcctttgaacccaggagttcaaggctgcaatgaactatcatggtgccattgcactccaacctgggtgacagagtaagacctagtctctaaaaaaataagagttaaggccagacacggtgactcacgactgtagtctcagcactttgggaggctgaggcgggcagattacaaggtcaggagtttgagaccagcctggccaacatggtgaaaccccgtcgtactaaatatacaaaaatcagctggccgtggtggcatgtgactgtaatcccagctactcaagaggctgaggcaggtgaatcgctggaacccgggagccagaggttgcagtgagccgagatcagaccaccgcactccagcctgggtgacagagcaagactctgtcttgaaaaaaaaaaaaattaaaaaaagaaacatggcccagtgtggtggctcttgcctataatcccaacactcagggaggccaaggtgggaggattgcttaagcccaggagttcgagaccaggcaacatagggagaccccgtctgtacaaataattttaaaaattagccaggtgtggtggtgcatgcctgtggtcccaggtgctcaggaggctgaggtgggaggactggctaagcctgggaggttgaggctgcagtgagctatgatcacaccactgcactccagcctgggtaacacagtgagacaccccgtcttaaaaaacaaacaaacaaataaacaaatactatgcataaaacctcaaggctcaagaaacaacagtttgaaatagttagatgtgtgttttttaattttcatgtcttatcttttctgtttttttttttttttttttttttttagagatgagatcttgctctgttgcccaagctggtatcgaactcctcctgggctcaagcaatctcctgcctaggactccctcctaacagctggaactacaagcatgaaccactgcacccagctactggtgtattgtttcagtagtctttttaaaaaatgttaatatcttggtaaaaaatatatttatactgttctctaacctgcttttttcatcagtgtgatggaaaaatgctcatcatatattcttctgctatataactttagatgtctacactgatttcatttatgacatcacaattaaactggttaaaccaaattcatattgctcacttgtttctaattttttctctattaaaatgatatgataagcatccttgtagccaaatatttacacacattcattaaggtttacttaaaagaaattcctagacgtggagctgagtcaaagagaagggatcttttaagtatttttgcactgattgccatgaaaaggtcataccagtttatacattcatcaatatatgagtttcttttctaaatcttcttcaacatcatgtgagagacagttaaagcatagttgttcagagcccaggcttgagaatcagatttcaaaggtatgaaccctctccctttttcttttccttttttttttttttttctgaggagtcttgctcagtcgcccaggctggagtgcagtggcccaatctcggctcactgcaagtgtgtccagaattggtggattcttggtctcactgacttcaagaatgaagccgtggaccctcacgggagcattacagctcttaaaggtggcatgtccagagttcgttccttctgatgttcggatgtgttcggagtttcttccttctggtgggttcgtggtctcgctggcttaggactgaagctgcggaccttcgtggtgagtgttacagctcttaaggcggcgtgtctggagttgttcgtttttcccggtgagttcatggtctcgctggcttcaggagtgaagctacagaccttggtggtgagtgttagagctcataaaggcagtgtggacgcaaagagtgagcagcagtaagatttattgcaaagaacgaaagaacaaagtttccacagtgtggaagggggaccccagcgggttgccactgctggctagggcagcctgcttttattctcttatctggccccactcacatcctgctgattggtagagcccaggggtctgttttgacagggcactgattggtgcgtttacaattcctcagctagacacaaaagttctccacgtccccaccagaatagttagatacagagtgttgacacaaaggttctccaagtccccaccagagtagctagatacagagtgttgattggtgcattcacaaaccctgagctagacacagggtgctgattggtgtgtttacaaaccttgagctagatacagagtgccgattggtgtatttacaatcccctagctagacataaaggttctccaagttcccactagactcaggagcccagctggcttcacccagtggatcgtgcactggggctgcaggtggagctgcctgccagtcccgcaccgtgagcccacactcctcagcccttgggtggtcaatgggactgggctccgtggagcagggggcggcgctcgtcagggaagctcaggctgcacaggagcccacggaggcggggggaggctcaggcatggagggctgcaggtcctaagccctttcccgtgggaaggcagctaaggcccagcgagaaattgagcacagcgccagtgggccggcactgctgggggacccagcacaccctccgcagccgctggcccaagtgctaagcccctcattgcccggggctggcagggccagctggcggctccgagtgtggggcccaccaagcccatgcccacctggaactccagctggcccgcaagtgcggaacgcagcctcagttcccacttgcgcctctccctccacacctccctgcaagctgagggagacggctccggccttggccagcccagaaaggggctcccacagtgcagcggtgggctgaagggcttctcaagtgccgccaaagtgggagcccaggcagaggaagtgctgtgagggctgccagcacgctgtcacctctcacaagctccacctctggggttcacgccattctcctgcctcagcctctggagcagctgggactacaggtgcctgccaccatgcccagttaatttcttgtatttttttttagtagagatggggtttcactgtgttagccaggatggtgtcgatctcctgacctcatgatccacccgcctcagcctcccaaagttctgggattacaggtgtgagccaccgcgcccatcccctttttctttttagagacagggtcttgctatgttgtccaggttggtgcgaaactcctggccttaagcaaccctgccacctcagcctccaagtaaactgggattacaggcgtgagccatcttgcccaacttccactttctagctgtgtgatcttcagaaaatcagttaaattctctgggccttaatttactgatagggttcttgtaagtattaaccattagctactattgagaggtgaagaccgctgggcttctgggttgggtggggacttggagaacttttttgtctagctaaaggattgtaaatgcaccaatcagcactctgtgtctagctaaaggtttgtaaacgcaccaatcagcactgggtaaaaacgaaccaagcagcactttgtaaaacgaaccaatcagcactctgtaaaatggaaaatcagcgctctgtaaaatggaccaatcagcaggacatgagcagggccaaataagggaataaaagctggtcaccccagctagtagtggtaacctgcgtgagttccgctccaggctgatggaagctttgttcttttgtacttcacaataaaccttgctactgctccttctttgggtccatactgcatttcagagctgtaacaccgtgaaggtatacagcttcactcctgaagccaagaccatgaacccactgagaggaacaagaaaaacaactctggacctgctgcctttatgagctgtaacactcaccttgaaggtctgtggctttactcttgaagtcggtgagaagcgagaccatgaacccaccagaaggaacacattccggacgcatctgaacatcagaggaaacaaactccagacacactacttttcagaactgtattaagaactgtaacagtcactgcgagggtcygcggcttcattcttgatgtcagcgagaccaagaatccaccagaaggaaccaattccagacacagaattatttgccttcttacttcctgagagttctaggcacagaacatacttgaggtgttatacaaaggtaattagaactgacagggaattgtatgattaatgacgtgggacatgagagatttggaacgagataaaaaggcttaccttgaggacagccttattaggagcagaggcaaacacaggttttgtgggtttgaagcctacacatttatagctttctctaattacacaggtaggaaattataaaatcaggtacaagggcttggcaggggcctaaagcttaagtgatgaaaaaaaaaaacaccacacctctggtgaaaccaatagcttacgaaaaagtagaaaaaagcgcgatgcatggggagctccggtagtcctttgaggtatttgagaggctgagtcaggaagatggcttgagcaccaggagttggaggtttgtaagtgcagtgatggtaaactgccgctgtactccagtctggcaatgtagtgagaccctgtctctcaaaaaaaaaaagtaacccttgcctgactgggacaataattgagaaaccagtaaaacaaaataataactattagccgggcgcggtggctcatgcctgtaaatcctagcattttgggaggctgaggcgggcggattacaaagtcaggagtttgagaaattactacctattaccccatttggctatttttacacttgtaaggaatgaagctcagaggtcacacagctagtaagaagccagcacccttcgatgtgggattgatgtggaggataggcatatacagagaacacaaaagcaaaacaccatggtgcagattttgaaagaaaagccctaagattagtaatgagtgtgaattattcaacaaagtgatcaaaactaactccagctctgcattcctcttcgccrtcaggagtttggagcctggagactgctagctgcctggttctttaagaaccagccctggtccagcccattccgcaggccagcaagcttctgaaaagcaaacctaggaagtagctttccaacataaagtggaggtttcaacacaggagactttaagcaagttccagtgtgtctatatttggtctggctgatcggctggactctggccttccccgctcacgttagcagacagctctgccctagtgggcgcttagcctgcgacggcagcccgagaggatgtctaacaagcttctttctccccacccccattcagttgttctcaggtctgaattcaaaatggcctcatctcctgctgtccttcgagcgtcccggctgtaccaatggagcctgaagagttcggcgcagttcctggggtctccacagctgaggcaggttggtcagatcattagggttcctgctcggatggcggcgacgctgatcctggagcctgcgggccgctgctgctgggacgaaccggtgcgaatcgccgtgcgcggcctagccccggagcagccggtcacgctgcgcgcgtccctgcgcgacgagaagggcgcgcttttccaggcccacgcgcgctaccgcgccgacacycttggcgagctggacctggagcgcgcgcccgcgctgggcggcagcttcgcggggcttgagcccatggggctkctctgggccttggagcccgagaaacctttggtgcggctggtgaagcgcgacgtgcgaacgcccttggccgtggagctggaggtgctggatggccacgaccccgaccccgggcggctgctgtgccagacgcggcacgagcgctacttcctcccgcccggggtgcggcgcgagccggtgcgcgtgggccgggtgcgakgcacgctcttcctgccgccaggtgactcacctccgctaattgttccgtgttcgttcgcctttcactttgtgtgtctcccccgccccacgcttttcgcttatgtgtatgccccccccgccgcgcccccgggctatattgcccaggcaggtttcgaattcctggtctccagctatcttcccgcctctgcctccctaagagctgggattacagggtgagccaccgcgcccggcactttgaggggagttacactttttttttttttccgtccctgcccttttcacacgaagaagggatgtagcttccaaccttccggaggttagtgtaaagaaacaggaatggaatggaaagctgattggggaagtgtccctgccgctccaaaactgagaggtccctcaaacctagtgctcagttaaaagacattgtaagggccaggcgcagtggctcacgcttgtaatcccagcactttgggaagtctcggcgggcagatcacgagatcaaaagattgaggccatcctgactaacacggtgaaaccccgtctctactaaaaatacaaaacagtagctgggcgtagtagcgggcgcctgtagtcccagctactcgggaggctgaggcaggagaatggtgtgaacccgggaggcagagtttgtagtgagctgagatcgcgccactgcactccagcctgggcgacagagcgagactccgtctcaaaaaaaagacattgtaaggaaaggaaaaagacacttatattaaaaacaaaacaggccgggcgcggtggctaacgcctgtaatcctagcgctttgggaggccgaggccggcggatcacctgaggtcaggagttcgagaccagcctggccaacatggtgaaaccccatctctactaaaaatagaaaaattagccaggcgtggtggtgcatgcctgtagtcccaactacttaggaggttgaggcaggagaatcgctggaacccgggaggcagaggttgcagtgagctgagatcatgccattgcactccagcctgggggacaagagtgactctatcttaaaaaaaaaaaaaaaattcaggtagtttcaattttttaatgttcttatttatgtattgactaggaagccactttttttttttttttaataagaattccgactggttttctcactgtatttccatggcagctaggaggtgccaggtggctgggcctgtgacagtgcagaggttttggtgcctgcccgcccaccattgctccagctgcagctgctgccccctgcagggcctgttcgttcstgctgcctagctcccygctggctggctatgatctccctgttaccattccaggagagcagccrcstccctrtgcatggcaggaccaggtactattgtggcctctcctcttggcctcgaatggtatcyttgtcatcagtgagcaagtccccaaagaccacggtcttgtccattgtcaggataattcactccacaagctggggctccaggtgctgccctacccagcrgtgcttctcacccacacagtggtcatactttggcaggggctggtgcagtgtgaagacctcggtgttttgcatgtgcttcatctcttgcaaggycctcyggggttgggcttcaagactagggaaaagcctgggcttcacacccatgggccactttatccaccaggtccggcagcagggtgaggtactgcttccagaccaggaagctgcggtgctgctgcagtgtcacatgcagctccctgagaaggggcggctgaagccccgcaggaggccgtctggaagctgccagcacgcggtccctgtccatcagcacacgcgtgggctgtgctcatcgctgccggggcactggggtttctcgggatcctaggggtatggggcccagaaatgttctttaaaagtttctcatttttgcaacttttctttgaattcgcacagtatgttaagatttatgtaaattagcatttacaataggaaaacctcttcctgtcaaatggaaatttgaggttactggatacttttatattacataaagagcaatcagccagtgtaaaaatgaaatgatgcttatccttattaataatcaaagaaatgcaaaataaaacaacagagtacatttcacaccctcagaagtggcccacttttagaagctagcattatcaattgctgaccagtatgtggaggaaatgaaactcactgctagaaggagcaacatattcatctgctctgggcaacaatttgtcttaacttacaaagttaaatatgttattctacttgtacatgtgcaccaggaggcatattccttataagaggaaagccattgcagatgagcagtctggattaatttaaaaaaagagcaaagtcaactggaaacagtccaaatgtccatcaacaatagaacagattaataaattgaggtatatttccagcagtcaaagtgattgaactacagctacaagaatcaacatctatcaagatatacaaaagaaaagaaaaaaaaagaatsaacatggatgaatctccaaaccactgttgagtgaaacagtcaaaccctaggagaacacattcagtatcattccatttagatacarttcaaaaactaggcaaaataaaatattaaggtacataatctaagtggtaatactatgaagaaaaccaagagtgatacacagaaagtccaggatactggaaagagaggaaagggcacaggggtctgtgggacgttgatggtttgcgggtatcagcactgaactatgtcttaaaagtgttgcctgtaaggtgtttgcattcttttttttttttttgagacagtgtctcgctctttcgcccaggctggagtagtggcacaatcttggctcactgcaacctccacctcccgggttcaagcgattctcctccctcagcctcccgagtagctgggattacaggtggccgccaccacacccagctaatttttgtatttttagtacagatggggtttcaccatgttggccaggctggtctcgaactcctgacctcaggtgatccacccgtctcagcctcccaaagtgctgggattacaggcgtgagccaccggacccagcctgcmttattactatttaattttgtgtgaaacacaaaacctttaatgtaaatgataaaaatatcagtaagtggagtcattcagaatgagtagccttttgagtctgtctccgttgagtaagtgcattctgttgagtgcactggagaggaatttgtgctcttctatgtagcagtctttctttttgtttcttggtggtgcaccattaaatggattcattcaccagttaaaggacatttgggttgtttccagtctttggctacaacgagtaaagtcactataaacacttgccagaggtttctggacgaacaggttttcatttctcgtgggtagatacctaggagtgggattgctgggtcacatgtgtggtaagtatatgtttaacttaaaccatccaactgtttcaggaatagcttagttttgcattttgttttgtttcttcccaagaacctgggccctttcctgggattgtggacatgttcggaactggaggtggcctgctggagtatcgggctagtctgctggctgggaagggttttgctgtgatggctctggcttattataactatgaagacctccccaagaccatggagacgctccatctggagtactttgaagaagccatgaactacttgctcagtcatcccgaggttagttcttctttcagatttatgggctatgatgtatcaggtctctycttaaatggtctgggttttcacagaagttagctcattcatgacagccattccctaccccaacacacactaccttttttagtcacttcttatagacagtttctttttttgagatggagtctcactctgttgccaggctggagtccagtggtgcgatcttggctcactgcaacctccacctcccaagttcaagtgattcttgtgccccaccctcccgagtagctgggattacaggcacctgccaccatgcttggctaatttttgtatttttagtggaggcggggtttcacaatattggtcaggctggtcttgaactcctgacctcaaatgatccacctgctttgacctacccaagtgctggattacaggcatgagccactatgcccagcctaatatttgtattttttttttttaagtagagatggggtttcgccatgttggccaggctggtctcaaactcctgacctcaagtgatctgcccaccttggcctcccagagtgctggaattacaggcatgagccaccacacctggcctcttatagacagtttctattcaattctatattactatatttcctgctagtaaagagattcgtagttgttattatgcaattttaaattccagtattttttttttttttttttgagatggagtcttgctgtgtcacccaggctggagtgcaatggcatgatctcggctcactgcaaactccacctcccaggttcaattgattcttctgcctcagcctcccacgtagctgtgactacaggcacgtgccactactgcccggctaattcttgtatttttagtagagatgtttcaccatgttggccagactgatctcaaactcctgacctcaaatgatccacccgcctcagcctcccaaactgttgggattacaggcgtcagccaccactcccggccatgagatgatgtacttgttgatgatgactcagtttagttatgacagtgggaatgggtggctcaggtgggagacagaaaaagatcatgggagatacgagattaaggaactgagaaaccagagaataattgatagatcttccacatggttatcaccaagagtggtgatggacaaattgtggaaaggaagagatagaggggaggtaaattctcaaagttgcaaatctgggtaaatggtagaacctagattcagactcaggttcaactaacttccagggtggacacaactcaccatattccactgtttgtggarycattcttcttctttttcctttgtccctttctcaggtaaaaggtccaggagttgggctgcttggaatttccaaagggggtgagctctgcctttccatggcctctttcctgaagggcatcacggctgctgtcgtcatcaacggctctgtggccaatgttgggggaaccttacrctacaagggcgagaccctgccccctgtgggcgtcaacagaaatcgcatcaaggtgaccaaagatggctatgcagacattgtggatgtcctgaacagccctttggaaggacctgaccagaagagcttcattcctgtggaaagggcagagagcaccttcctgttcctggtaggtcaggatgaccacaactggaagagtgagttctatgctaatgaggcctgtaaacgcttgcaggcccatgggaggagaaagccccagatcatctgttacccagagacagggcactatattgagcctccttacttccccctgtgtcgggcttccctgcatgccttggtgggcagtcctattatctggggaggggagcccagggctcatgccatggctcaggtggatgcttggaaacaactccagactttcttccacaaacacttgggtggccrcgaggggacaatcccatcaaaagtgtaaattttatttgatcatgtggcctctctsttgctaatctctcctggaaacatctgccacatttagtgtgtgtatgtgtattcattcttttgtttwtaatamytaaagttttttcccctcattattaaaatgaatttaccagtaagaatgagtttttaagatttttataaactgtatactttatcagtttgggaagggagtaactgtaggaaacacaagaagtggaaaaagtctcctcttcctatctcaacacacaactgataaggctttagttctgaaaggaaaagtgagtaacatcaattaacagtgtctggtacgtaaatggagttcaataattatttgctgaatgagtataagtgagccaggcgtggtggctcacacctgtaatgccagcactttgggaggctgaggtgggcggatcacttgaggtcaggagtttgagaccagtctggccaacgtgatgaaaccccatctctcctaaaaatacaaaaaattagccaggcgtggtggcaggcacctgtagtcacagctacttgggaggctgaggcaggagaattgcttgaacctgggaggcggaggttgcagtgagaagaggttgcagtgagaaaagattgtgctactaccctccagcctgggcaacagcaagactctgcctcaaaaattaattaattaattaattaaatgattacctactgtggaagaaaagcacataatataaaaagtgtatcagatttgagttcctcctttaagaatggaagttaacatcttgcctataaactgattactagttagatataaaactactaaaaattttcaaaaccaatacatatttagttctttgatatcttctccttggattaataaggattctcctagtgcaaataaattttacattcctgtttatacatatggacttttaggatttgtttcaaaagctgataaaacattattgagatgaattacataagtgattttaacaatgacaaatgtgaagttaaataacaatttaggcttggcgttggtgactcacacttgtaatgccagcactttgggagaccaaggccagtggattgcttgagctcaggagttcaagacaagcctgggcaacatgggaaaaccccgtctctacaaaaaaatagccagacattggtggtgcatgcctgtagtcccagctactggggaggctgaggtgggagaaccacttgagccctggaggcagaggttgcagtgagctgagatcgtgctactgtgctccagcctgggcaacagcaagacacagtctcaaaaaaaaaaaaaaaaaaaaaaaaaaagacaatatttatatcacttgatataaatagttccacaataaacttgttttttttttaaaccttagttgtatttaaaggaaaaaaaaccttaatttattattcttttcttttcttttttttttttttttgagagagggtctcactctgttgcccaggctggagtgcagtggcacagtcacggctcactgcagcctcaacctcgtaggtttaagctattctcccacctcggcctccctagcagctgagaccacacaggcacacaccaccatgcctggctaatttttaattttttgtacagatggggtctcccagtgttgcccagactagccttgaattaccgagctcaaacaatcctcctgcctcagcctcccaaagtgctgaaattacaggtgtgagccaccgctgccagcttccggcaccttttttctaaaggaattcatggttttgtagcagtagaatataaccagatctacagtagagagatgataccctgaaatgaagctacctcctgtgttactctgcaacccaggaatgcagctggtgccatgtctccaaacttccacaagaatgccagtgctgggcatggagccccatttagagtacacatgacctgaggctctgaaaactcttagagatgatgcaatctgggacagttgctcatagctggcctggccaagtcccaccccaagatgccaggccacaacacaaaatttcaagtcatattgttttatctttccccttgcaattatatagtatatgactctcttagaaaagtgcaatagttaaaacttgttttagtagatgctagatcccaaacttgagtctgctgaagcccttttgagaccttagggaccctattccccattcttagaaattcgggctggtgaatattaaaagcactacagatgagctggtgggtgtagaagcacatgcctgtaatcccagctacttgggaggctgaggcagtaggattgcttgagcccaggagttcaagtcagcctgggtaacatagtgggacatgatcttataaaaacaattttttttttttgagacagagtctcactctgttgcccaggctggagtacaatggcttgatcttggctcactgcaacctccgcctcctgggttcacgtgattctcctgcctcagcctcccaagtagctgggaatacaggcacccgccaccatgcccagctaaattttgtatttttagtagagatggagttttgccatgttggtcagactggtctcgaactcctgacctcaggtgatccacccagcttggcctcccaaagtgccaggattataggcgtgagccaccgcccctggcaaaaaaatgttttaataacatgaaaaattttaaaaagcatcacaggggttcagatcacctatcagcctcttgacatttcatctttttttttttttttttgagacaggatctctcacccaggctagagtgcagtggcagtaacatgatctcggctcactacagtcttgatctccaagactcaagtgatcctcccacctcagccccctgggtagctgggactgcagacacatgccaccatgcccagctaatttttgtatttttgcagagacaaggtttcaccatgttgcccaggctggtctcaaactcctgggctcaagcagtctgtccatcttggcgtaccacactgattggattataggcatgagcaaccgggcccagcctagttagtctttattagttatttgacaggcatttttctttttattttcaacccatgcaagctgtgaacgtggtgaaacagaccgaaaagttcattaaactaacatgctccataatgattgattgattgattttaaaatagaggccgggtgcggtggcttatgcctctgtaatcccagcactttgggaggccaaggtgggcagatcacctgaggtcaggagttcgagaccagcctgaccaatgtgatgaaaccctgtctctactaaatacaaaaattggccaggcgcggtggctcatgcctgtaatcccagcactttgggaggttatggtgggcagtcacgaggtcgggagatcaagaccatcctggctaacacagtgaaaccccatctctactaaaaatacaaaaaattagcagggcgtgatggcgggtgcctgtagtcccagctactcgggaggctgaggcaggagaatggcgtgaacccgggatgtggagcttgcagtgagctgaaatcacatcactgcactctagcctaggcgacagccagcctccatctcaaaaaaaagaaaaaaaaaaaaaaaacagccaggtatggtggcatgcgcctgtaatcccagctacttgggaggctgaggcaggacaattgctttaacccaggaggcagaggttgcagtgagccgagatcacgccattgtactccagcctaggcaacaagaacgaaattccgtctcaaaaaaattaaaaaaaaaaaaaaaaaaaaaaaaaaaaacgctgggtgtggtggctcatgcctgtaatcccagctctttgagaggccaaggcgaggggatcatgaggtcgggagtctgagaccagccaggtcaacatggtgaaaccccatctctactgaaaatacaaacattagccgagcgtggtgctgggcgcctgtaatcccagctactcgggaggctgtggcaggagaatcacttgaaaccggaaggtggaggttgtggtgagccgagatcgtgccactgcactccagcctgggcaaaagggcaaaagccgtctcaaaaaaaaaaaaaaaaaaaaaaaagtagagatggggtctccctatgttgcccatgctggtcttaaacacctgggctcaggcaatcttcccaccttggcctctcccaaagtgctgggattacaggcatacaccactgcacctggccatcatgaataattttaaagggaaccactacgtaaacaatacccacgtccaatgggcatggtttttaaaagcatatttaaagtgtataacatggaccaggcacggtagctcatgcctgtaattccgtcacttcgggaggccaaggtgggtggatcatttgaagtcagaagttcgagagcagcctggccaacatggtaaaactccatctctaccaaaaaataaaataatttgccaggcccacatggtggtgtgcacctgtagtcccagctacttgggaggctgaggtgggtgaatcgcttgaacctgggagtcggaggttgcagtgagccaagattgtgttactgcactccagcctggacaacagagtgagaccctgtctcaaaaaataaaaagtatacaaagtgatgggtggggcagggggttgtttttgttttaagagacaggctctggccaggctggagtgcagtggcgctatcatagctcattgcagcctcaaacwcctgggggctcaacccatcctcccacttcagcctcctgagtagctgagactataggtatttgccaccatgcccagctaatttttaattttttgtagaaacagcgtcttatgttgcccaggctggtctcgaactcctggcctcaagtgatcctcctgtaatcagtagaacggtgcagctgctcgccacttgtaaaaagaagccaatataataagagtgaagtgtgataaagagagtgagttttattatccatgctagcaaggggagaagtgagtgcagttatttgcaaatatttccacttttcaatttgtggagggaatccaggagcttttgaagagagagtttggagtgcagaagaggcagcggaactaggagttgtcgggtggcgtgacctgctccactggcttgttttgaagtattgtttcatctggtgaaggagccagtgccatcatggtggctagagatatctggtccatatccagatccagtccctgaagctgaaggaaatatatgaccaggtaatggtgtgtacttaacaagcatctaggtaaatacatgtgcataaggcacagaagcacagaatgggaaaagaaagggtgtggaggttcagcacattctgagggtgtatttcaagatgaaaggaaactcatatgcagatggtctcagagttctatcttgagactcactgggggaggagaaagggggaaaggaaaaaaaagtcttaaggtttgaggctaagctgctaacctgcttagttacactcccaccttggcctctcaaagtgctgggattataggcatgaaccactgtgccaacccaacatagtgttttgatatgtgtatattaacacactgtgaaaggattcacaggtaattaaccaggtaattccaggtaattaacctatccatcacctcacacttttttttttttttttcttgtggtgaggacacttgtcttagtctcttcaactgctgtaacaagatgtgttagactgggtaatttataaacaacagaaatgtattgctcacagttttggaagctaggaaatccaagatcaaggcacccacagatctggtgtctggtgagggcctgttcctcatagatggcaccatcttgtgtcctacctagtggaaagagcaaggcagctctcttcaacctgttttataagggcaccaatcccattaatgagggttccaccctcatgacagtcacttcccaaatgcctcgtgatgtgtgtgtgtgtgtctgtgtatgtgtgtgtgtgtgtatctcaggggctccaggcctcaatacaatgggtataacaacaatcccatcttgttgggaggaattaacaatcatgcatcgagccctgggcctcaggcttcaatgtattagttattagagctaatcattatttaatgttttaaacacccccaggaagtagagaacattcctgtcacattct

SEQ ID NO: 94960 - DNA, 14240 bp, Homo sapiens
gtatatacagttgacccttaaataatatgggattaaactgcacaggtccacttatatgtagattttttcaataaatatattgaaaatttctttggaaatctgcaacaatttgaaaatacttgcagataaaccatgtagcctagaaagtttttaaaaataagaaaaagtttaggtatatcatgaatgcataaaatatatgtagatactagcctatcatttactttcttaaaatgtacactaatctattatagaaagttaacatttatcaaaatgtacgcacacaaacacataccatacatggtgccatttgaagtcaaaagaaatgtaaagatgcaaaacaaatgtaaagatgcagtatgaaatcataactacataaaattaactgtagtatatactgcactattgtaataattttgtagccagctcctgttgctgttgcagtgagctcaagtgctatgagtatccgtttacaacaatgtgtgatgctaatcctttctgtgtgagcagttggtctctctagtaaattgtgtatcatagtaaaaagtgatttctcatagttctcacatattttttcaggtttagtgcaacaccataaaccttgaataacaccgtaagacccaacaaagtgccactagtggtgctggaagtgcttgcaagaagcaaagtcatggcattacaacaaacagttgaataacttgatatgtaccctagattcaggtctgtagctgtgattgtccaccataataaatgaatccagaatcaggaccattttaaaaaaaaaaagaaagaaaaggagatttgtgaagctctcagtgcagccatgacagcaggcaagaaaactttgcattttgtttcaaagtatcttatcttgtgttgaaaatgcagcttttctgtaggtgcaggattgttacaagaaaggtctacctatagactctaatatgatttcagaaaaagcgaaatcattgtatgaaaacttaaagcaaaagaaaggtgaattatctaaagctggagaatttaatgccagcaaagtatgtcttgataattttagaaagatatttggcttaaaaaatgtcaagcaacaggagaagcagcttctgctaactaagaggcagcagataagttctcagatgcattaaaaaaatcattgaggagaagaatatctgcctaaacaggtttttgatgccgatgaaaatgccctattctggaaaaaaattctacctaggatatttattagtaaggaagagaagtgagcacccacatttaaggcgggaagggataggctaactctactgttttgtgcaaatgcagtcaggtttatgatcaggactgcctttatctataaagctgctaacccctgagccttgaaggaaaaggataaacacaagctaacagtcttttgattgtacaacaagaaagcctcaacaatgagaactctttttctgctttagttccaccagtgctttgtctctgaagtcaggaagtatcttgcgagcaagagactgccttttgaagatcttttgatattgtacaacgtccctggccacccagaatcccgtgagttcaatgtcaaaggagttgaagtggtctagttgcccccaaacacaacatctctaattcggcctctaaatccagaggtcataaggatttttacaattcattatgcatggtactctaaggaaagcattgtcaacgctatggaaaataaccccagtagaaaaaatatcatgaaagtctgaaagaattatgccattcatatgccactgtgttgtagaaaaagccatgaaagccatcaagcccaaaacaataaattcctgctggagaaaactgtgtaccaatattgtgcatgacttcataggatttataacagagccaatgaaggaaatcatgaaagggattgtggatatgacaaaaaaaggtagagggtgaaaggtttcaggatatggatcttggagacattcaaaagctaatagataccacaccagaggaatgaacagaagatgacttgatggagatgagtgcttctgagccagtgccagatgataaggaagaagacatagaagaagcagtgccagaaaacaaatggacattagacaatccagtagaaggtttccagttatttaagattgcttttgacttctcttatagcatggacacttctatgatatggtcactgaaactaaaggaaacagtgagaggggattggtaccatatagaaacacttttattaaaatgaaaaagcaaaaaagtcagacagaaattatgaggtatttctgtaaagttataccgagtgtaacttcctttcatgcctcgcctcacacctcttccacctctgccacctctgggatagaaagaccaacacctcgtcttcttcctcctcgtcagcttactgggtgtaaaaacaagtatgaaatcctttatgatgatctactttcacttaatgaatagtaaatatattttctcttccttgtgattttcttaataagattttattcttttttagcatgctttattgtaagaatagtatacgatacatataacatacaaaatatgtgttattttgactgtgtatgctattggtaaggcttccagttaacagtaggccattagtagttaacttttggggtgtcaataaagttatatgttgtacaggaggtcagtgcttccaacccttgtgttgttcaagggtcaactgtacacagaaagaattgaaaacatgtactcaaataagtgcatgtacacaatgtcctagcagcaccattcacaatagccaaaaggtagaaactgccaaatgtccaacagcagaatggatcaacaaattgtggtatatccgtataatggaatattattcagtcataaaaaggataattcatacatactgatgtatactataatgtggatgaaccttaaaaaacatgctaagtgaaagaaataagacatgtaaaatcacatatatgattccatttttatgaaatagccagattagataaacctatagagacagaacacagattggtggctgttgggctgtgggaaggagaaatggggataaactgctcaaagagtaagaggctttatttgtagttatggaaatgttttggaactaaatagaggtggtggttacacaacattgtgaatatactaaatgccaattaatgtgttcgcttaaaaaatggtaaattcaataagaatttcacctcaaattattttttaacttagtaaagttttatatataatggtgttatgcatgatttcctttgttgtttatctgtcttttctgaagtttaataatatgcagtattgttttaattattaggaatgaattgtttttaaaaataataaaaataccccgagaacctcacaatttaaaactactctttaaagaaggtgggaaatatggctaagaaaaatttaggcatcttttttacacacttttagaaaaatacatttttaaacaatatattttaaagtgtaacatttataattttcatctctgttcactagcaattaaatttctttccatatattgtttcccagaactttttaaacataaattaaaagaatggcagcagaaaaattcattgacttattttagaactagtgcctttgcaggaaaggagagttggtgaaagggactgggagattgggatgaaaaggtaaattcaaatcttacttttacaaaaggaacaactagccatttagagaatgagaaaaaagttcatttcacagatgcctttgttttctctctcttactgtgtctgcttgatataggactaagataaagtaaatgcgcaacacttttttttctttaatcataaaactattccctgaatagtttcgttacagtagttaagttttgttttgaaaaaattagagaagcaataaagaaggatttgcagttctcatcgcttctaattttcttctgtaatgagttttcggcttaaatgtgtatgcagtttttcctttttccttatacgggagccaagttttgttgtggcagtcaatttctgttgaggaaaaacacaaacattagtatcagcccaaagcgagggtggaaaacatttggaagaacatggaaggtgttattgaaaagaagaatagatcaaagatcttaattttttctttctatgagtcatgtaacaaaaatataaatatctaataaaataattagatattgccaagcaaaacaatggcttaaattgtttctcgaagtgtggtttgctgaccacctgaatcaaacttttccaggatgcctgttaaaaatacaaaggataggttcaaccgcagaactgctgaagcaaagactaagggaggtgaagcaagtttaaaatgaaacaaaataacaatacacataaacacacacagtctaagccagaggccagtatactatgcccagaggaggaaaaatggcccactccctgtttttgtaaataaagttttattggaacacactcacagtctatggctgcttttgagctacaatggcagagttgagtatttgtgacagagatggtacagcctgtaaaacttaaactatttattgtctggccttttaccaaaaagtttgccaccccttctctaagcaaatgcctctcaagctgcattgtggatacaaatcacctgggaatgattttaaacagatgactttgattcagtaaatctgaaataggcctaagattctgtgtctttatagattcccaggtgaagctcatgctgctgtcttgcagaacagatttgagtcgtaatgctctagaacagaggttctagagtacgaggaatgtaccttctcagctccaacacagacctactggttcagaaactctgtggatgggatccagcaatccattccttattgagacctccaggtaattctgatgcatgacaaagcttgagagccactcatccacattatccttatgctaactgaaacttgacaaccactgtcttcagagagcctgaaattaatgttcatgttacattccattatcactgattctcctaaatacaatatatgttggttgatcataagaatcaaaagggaaggagacactgtatgaaattgccactaaatgccatgttatttatttttcccttgtatcttcagtgtggtggttttaaagacataaaatttcaaatgtgtctccactgatttagtatagtttagtatgttacttttggggacctctattttcatggctgcacaaaatagctccaagtgccatgtcatttctgaaatgagcaacagagggagctagtgttataatagtaatcctcccggataggggcgttttcacattggctgaattaatgacggaatggcttcttgactcatccttgagtaaaatgttattgtttggatttatagtttctactgtccgtgttcgatacagtcccttccaatgccgaaacagctataggttcaaaatgactgccacctgtaagcaattagatttgattactgtcaacattcacagacttccttacatgttcaaatgaggttgaagctaccagagattatgaaaacacagattcttttctcattaaatgtaaggtttttgggagaaggggtgttaacataatcatgagaataaatctaataagacagaacaatcccttaccaggatctgagagaaactgagaccaacaggtagatgcttcagtgcatttcctagaagtggctatttcggtacgtgatatgataggaggaagcaagccatgtaatgctgagctgaatgatgtcccttactggtagcaccagaaggaatacaaaccgttaaacataattgtccaatttgtcagcaggagagacaatgtttacaaaatgcaatggaacatattcccagaggtgaagaaccagcacacagatggcaagtagactatattagtcggctgccgttagcaccaggaagatttaaatgggttttgactggcacggattcaagacttggctttgcttttccagtcacacagactaatgttaataatacagtcgggctggggtagggaggctgactgagcaggagtcgtctgcttgtagtggaggctgctaggagccggtcagagggattcatgcataaaattttccatcccaacactgacgacgcgtcaggaactgtgtgtctagatgtaattaatcaaacytggacagctctctatgatcttaccaatatatttgagtccttcctgccccagttrttggcctatcctaaccccatagatcctctcaatggtgaagatgcagccatgtacctccaaagaccagaagaatacaagcagaaaattaaagagtacatccagaaatacaccacggagcaggcgctgaaagagcaggaagagggtaccagggacagctcatcggagagctctatatctgacttttccaaagatgaggcccaggatatggagttgtagtagaaaaagcacctgcttttcagaaagactattgtttcctaaccatgagaagcagactataatattcatatttaaacacagcaatttttttatgactaaacaaggtttttatgaataaaagcattgatatatatatattatatatcaccctttagatcttgatttcctggtcgtttctcaacctgaggtgcatagcatattcccacattccatttggtagcaatatgcggtccgaatgcatgcattcatgagtccatgtggccaagtcagcctgtgtgctactgaactgtcaaaggaaatagccgctctgataggtagacgtaagaagaacgggaaaaaaatcgcttcttttattgatggttccaaagaaacaaaccaaaccaaccagctcttggatgtgaagataaaatagtgcttttctgaaatggaaaggaaaaacttggggaggaaggggcctgctgtggggacattagagccagccacataagaatcagagctactacttcctgtgaatcctaggtggccctatgtcttctgtggagttacagtataaaacagggagctaattagagtattaaaacttaaaaccgttttttgactctgattttcagtacgtttttacatgtcggttcctgcccttcacactaccaggccctgcagccacagtgttctgttggagaaacttggagaagtgctttctgaaccggttctttttcttggggtagagcttgtaatccagacctgtttttcaaaggacagcacaagaggagaaaagtgactgggacgatgcttcctctcatccaaaacacgtgcagagtcacatcctcatcctagtgtttggcagtttgagactgctaccctgaacttaagagctttaaatatgagagttgtgttttcgcgggggtggggggggggtatttttttggtgtgtgtgtggggggggtttttttttggtgtgtgtgtgtgtgtgtattgtgcttagaaaggttgcagatttcatcttcacctaccaagaggcagccgcctccttggacaagccgctcatggacctttagacttgagaagacccgtgtggtgactgcaaagccctgggtacttgccttcatgttttggtttggttttccctttttctgctgctcttggcagcagcctgatcatcatctgcttgtgggagtgggaaatgggtattttagacccaacacaggttctaaatttaaaaaaataataattggagcaaataaaggttcttgtacccagagtgattctacatgggaaaaacaaaccagctttttttcagagagtgaccgaataggaagaagggattcagaaatatgatgtagtagaacatgccctgcaggaagaaaatgtgttctctcctgtgtatgttaagaggaaatcagtttaaaatgcctgctaatcaaatgttgtctcagctaaccgtatgtccaggttgctgcagagtttctttcaaatctgagtgttgcctgctgaactcagatgggagtttgaagaaattttagacagcagctctgtattctttttttgctgcagccaataagataatagcagaatttgccaatcctaagaccttctgaagacgatttttgagcatcccactgggattatttaatttttctttttgacgtgtgtttttagtttggaaatgctgtattccacaaggtttaagtcagtgaggttggaagatgccctatcttttttattgaaaaagcacaatcaatcttttgtttgaaaatctatataaagtacaacttgcttttagcatgattattttcctaaataaaaagacaaagaatttacttactttatgtaaaaaaaaaaaataataataatacagttaaaggattgaaacagaatatactgtatcaatttggcctaccaattgacatttcttctgatcaaagaaacaatttcctggcacattctgcacagtactaggcaaagtacccagggcagtgaatactcagtaatgtttgcagatgtaggaagagatggatggagaaccgaatgactggttgaattgacagattaaaagaggtagttgaagtctaatgaaggcattatcagtgtgaatgaaagaaaaagacaaactagagaaacatcacataggtagaatcttagggtttgataattgtttggatatagaggtcagcaaaacaaaaatggctgataaaagagagatggtatcttgaacattaataaaagaatcagaaagctaattgagtttggaaggaaagctaattcagtttggaaaagacgagtttcattttagactttagagatattaggatagtttagatagatgatgtcaaaggtgatatattcaattataattttactgatctgttcaataatcatttatcaaagacttgagggttctaggcactgggttacaggctgagtataataagtgccaacatttgttgagtacttatacagtaggcatttcttggtgctgggaatggggcagggaacttagatgaaacttagatcctagtgggggtagacagaaaataaaattaataagtaaaatatatgctattagatggtgatatgtagaaaaggaaagccagaaggtgggatagaaaaggttagggttaagtactttcaattttaaatgaagtagttagggaaggcctcaccaagaaagtggcatttgaacaaagaccagagcagataaagaagcaaaggtatcagggaaacaaatgttccaggcagagcagcaagcagcagtatgaacactaaatgcaaaggcccaagggtaggaacatgcctggagcatgggaggaatggttagaaggtaggtgtttctgcagcaggggtagagtagaaggatgtaatgtcaaggtggtagcagagaccagctcctgtaggcattttaggctgctgagatgattttcgtggaggagtgatatgacctaacctaagttctagtagtatcagccaggcttctgttggaaatgataattaaaagggaaagagcagaagcagttgagaggctaatccagctaatccagacaagaaatgatggtggttgggaccaggttgatagcagtgaggtggagagcattggttgtattctgggtatatgttgaaagtagggccaacacaatttgtagattgattgtggagcatgagaaaaaagagtaaaagatgattccaacattatttaccctgagtaattccaagaatggtgttatacctggctgaagatgaagaaggctgagaaggagtttgtgagaagtaaggattgggagtagttttaaacatgttaactgtgcaatactcattagacaatccagtgaagttagagaagcctgttttatatgagtctggagttcgggagagaattctgagtgggaaatccaaatgcgagagttgtcctgtacagatgatgtttgcagcctgaaactgatgatctcttggtgatctcatcgagagagtcagtgtagagagaaaaggagatcaaaggcttaagcttaggtccaacatttagggtcagagaaaactataggaacaaataagggagtgatcatcaaggagtatactaaagggagacatgtatgcaaataagcctcaagtgtatttgtactatagaggggttcaaaggagagagagaggtcaagactaccgaacaaatgaaggatcaagaaaggttcgttagagaaagactcactggaagtggggggaggatgaggattttccagacagagagaaatgacattaaccaatccagttcgttgtggtagggtggtcaagagtaacgactctggagccagagtgcctggatttgaatcctggctctgccagttactagatgtgtaatgttggttgaatcacttaacctctctgggcctcagtttcctcatctataaaatgaggataataatacatacatagggttgttatgaggattaaataataaaatatttgtaaatttcttagactacatgacactctgcatgttatacataagttttagttaaatctatagagatttggaactttatggaacaatttggaaattacagtggttggggtgtagagtaggtagagagaggaaatggtgtctaaggctggaaatgcagacaagggccagctcacggagactcttcatgttatggaaaataatttgaacttttccagtaagcatttggtcagattcatgtttttgaaacacaattctaacagtagggtgaaggttaccgagtgataagatgagatgagaggccaagtgatgaaactgagattgtgtgacaagaaagaaggtgtgaacaaaatggagagtgttaagcagatacaatcgacaaggcttggtcaccagttaaatgtgaagaatgaggaaaattacaaaggctgaaatgacttccagattttctattgcattactggttagctgataatccattttgttagaaggaatataggaggtagaacatgtgttaaagacagataatactcctattttgtgaatgtgggtttgagtacatctgtgacattctggttgagatgttctggcaccataggaaatggaaacatggaatgtgatctgatataaggctgtgactacaggagaggagtccaggctagaaatatagattcagaagtcatcatcatgctggtggttggaggagtcataaaattggaagggatgtctcaggaatcctgtatagaatgagaaagccaaagcagagtcctacaaagcatcagcacttggaaatgaggtggctgaaaaggaagcaaaactgttacagaggtagaagcaacacgaaagagaagccaaggaagagggaatatcaagggagataaggactggaagccaaatgttgcatagagaaaggtcaaggagggtgaggacaaaagagatttcgttaagtgtggcaattatgagatcactggctctccaccagaaaggcgaagtgctgaaagcaggaagctaattacaatgggtgtagcagacacagttggtgcccctcccatatttctttggcattcactatttccaaccttgccaatggcatcctacagaaagcacctgctactttctatgagggctttgtcatcagcaagagcccagccttgtcttggagctggccagatgtgccagagttaatggctgcaggagcagcccacagtgatttaagatgtgagtaccccagtattcctctcccaaggagaaatcactcttcagatttgtttgacagtttcccaaagatgccaaatgagattcaaatcccagtctcccacaatagtaatctaagataaacacattctatattgacttttttcctaccttgactcacttccctttctcctagcaaagattatcccccaagtaaactgctcccatcaaattcttatcagagcgtgtttctgggtgtgcccaacttatgacaaaaggttataaaagttttaagaggtgaagataaaaaagaattaaaatatttaaacttggttatgaatgaaaaaagataggaccataactagaagatgacatagaatcacgagacattttttctttatgtcatgggagaagcaagtttatatactgagcggacagaaactataggaaggggtgagggtgtaggagaagtgatgctctagtggagcatggtccctgggataggtggaaggcatgtggtaccacaaggaggggttaagagttgaggaagagggatgcctttttattaagtaaacagaaaggagagaagatggttacagtaacaagtaagagcacagttgtgtatgaatgttctggtggccagagagcagaaagggagctcatttactaactgtgaggtagattggggtgacagtgtaagtctattgggcaagaaaaatgatagaagatgcaggcaaatagaatgccctcatttaggtggcaaatagaagacgagaaaaatttagagagataaatcaagaaacaagtaacatagtaacatggaaaccaagaaggaaaaattttaaaggagagagtgatcaaagtgtccaatttcttgaatgaacatcagtaattttggaaaagaatttcttttgggtccatggaatagaagctatctacttaaaggataaaagagtaagcggatagggaaaaaaaatagagaatggcaaacagatgagaccttgaccagaagataattccaaaatatggattcacatcaagttaatggagaaagaacccaatggtatttccatgcataccaagatacctgtatttagaactctttagatatttggttgcattatatgaaatttcccagatttgaccatttttaacctacaaaaatgtcaatttcatatgatttgacctaatattcacaaatatcatagggaaattttttactgaccagaactcagattcttaggttccctgtgtcaactatcaactaagtctattgtgaatacttaaggcataaaactgccaagaatactatgcagttagcaaaacaccatggatgaaagatagtgaatgaaagataatgaaaattgacaaattattgattttatttttagtatttgttaataacatatgttctaccaaaagaataataatttctataacagagtattagaaataagcagctttctgaggccgagcgcagtggctcacgcctgtaatcccagcactttgggaggctgaggtgggcaaatcacgaggtcaggagtttgagaccagcctggccaaaacggtgaaaccctgtctctattaaaaatacaaaaattagcctggcgtggtggcgcgtgtctgtaatcccagctacttgggaggctgaggcaggagaattgcttgaacccagggggcagaggttgcatttagctgagatcacgccattgcactccagcctgggtgacaagagcaagactctctctctctctcaaaaaaaaaaaaaaagaaataagaaataagaaataagcagctttcttttttctggattttcacaaatactctaaaaataaaataaaaatatctctctagaacctttagtttttaattggagaatttttgagagtgaaatggctagagcagaatgaaactctgaatggtgatttatcagctagagacatcattgagtgaaaacaactttagtgaacttgattattttggttcttactccttgcttcagtaatttttttctcaaatttaattgcttcgaggccaatgatgaagggtgtgtaaaatgcaatttaacagatgaaaaatacctcctgtgatttgatattaagcaggagtgatggagtgtaacattaaaaaatggtatcagaggtgcatattctgcatttcacctttattacgtcaatttcaggttctggaacactggaatttcacacatgcttaattaaattacatcagtaccaatacttggagctcagaagaatttttggagaaagtttcagagacaaggaacatggggacaataattatttgcccttctggctactggaccagagtatgctcttgaagtctcttccatctgtaaatatctgaatggaattcaaagctaataagataacagacataactgagtgtatgttgggcccatgagagggagagtggtctatattaactcctcaatcctccaacccctataagtggtttcagatgcatgtatttttttgaagatgtaaaaagacaaaaatcagagagattactaaaatatattttttaaattaagaaattaaattctttttttcaaagacaatgtaatagctctaattatatctattttatagataagaaactaaggctttaggatattaatacttaagctgtatactgatggtcatacagttgatacccaagctctatctctaac

SEQ ID NO: 94961 - DNA, 16470 bp, Homo sapiens
cgcccgggcgcgctcccgcacggggtctccgggggcgggtccaggggtactccgtctgtgcgtgcgtccctgaggcggatttcgcgccgccgcagtcggggccgtcgcgcgttttcctttctcctcggaggctcctggcgttgccgcggggcacgctgggaaatggagtccctgcgctggccccgcccctgcaaggggaggatgcgcgcgggccgagccacgtgcgtgcgtgcgcgcgcgtgcgggcttgcgtgcgcgtgcgcgcttgcgagaccggcgctccgggctaggcactgtgggcgcaggcgcggctgccgcttcctctttaactcttcactcggaagcggtggagccgcgtggggcgctgcggggagtgggagtgtacccgcccgcaccccaggcgggcggacggagcgggaacggcacgtgagcgtcccgcgcgaggctccttcccctgtccgcatttcacagaagaggatcccgagggtccgagaggctgagtcacttggccaaggtcacccagttcggggctgaactggaatcaaatcaaaacaattaactaaattcaatgactatgaaaagatattattgaccccccccccaagtgctattactattaatagccaaatactgttttagttgcatctgttaattgcatacatcagtggttcttcttctgggtgactttgccccctaggggataacttggcaatgtctgaaaacacggttttggttgtcacaacttgagtgcggggtgctgctggcatcgagtgggtccagaccagacatgccgctcagcaccctgcagtgcacacgacgaccccccaaaaagaatgatacccgtcctccaatgtcagcagaaggaggtggaaaaaccggtctaggctgacggtagtaaacaggtgacccgcagggttttgtaaaaccgggtacgtgctgcctactgcttttctccttaatctcacagcacattgacagcctgatcgtttggtttattcatcatcacagaattaaataaatacaaggaacaaggccgggtgaggtggcgcacgcctataatcccaacactttgggaggccgaggatcaatttaggtcaggagatcgagaccagcctagccaacatatatagtgaaaccccgtctctactaaaaatacaaaagaaaattagccgggcgtggtggtgggcgcctgtaatcccagctactcgggaagctaaggccggagaaatgcttgaaggcaggaagtagaggttgcagtgagccgagatcgcgccactgcacaccaacctgggcaacagagcaagactccctcttagaaaaaaaagggccgagcatggtggctcactcctggaatcccagcagtttgggaggccaaggtgggcggatcacgaggtcaggagatcgagaccatcctggctaacatggtgaaaccccgtctctactaaaagtacaaaaaattagctcggcatggtggcaggcgcctgtagtcccagctactcaggaggctgaggcagtagaattgcttgaacccaggaggcagagcttgcagtgagccgagatcgtgccactacactccagcctgggcgacacggcaagactctgtctcaaaaaaaaaaaatacaaggaacaagatcacagacaaatagtacaaaacacttttttttcttttattttgagacaggctctcactctgttgcccaagctggagtgcaatgatgcagtcatagctcactgcagccttgaactcctggactccagctatcctccctcctcagcctcccaagtagctgggactaaaaccccatttaaaataaaactggccggatgcagtggctcatgcctgtaatcccagcaccttggaaggctgagatgagaggatcgcttgagcccaggagttcaagaccagcctggccaacatgacaaaaccccatctctacaaaaaataataataataataataatacaaaaatcagccaggtttggtggcacgcacctgcagtcctagctacttggaggctgaggcaggaggatggctggagctcaggagttggaggtttcagtgagccgacatcgcactactgcactccagcctgggccacggagccaaaccctgccaaaaaaaaaaaaaaaatctgggctcagtggctcacacatgtgatcccagcaatttgggaggccgaggtgggcgggtcacctgaggtcaggagttcgagaccagcctggccaacatggcaagaccctgtttctatcaaaaacaaaacaaaacaagactggaacatttgaaataaccacacatccatctattggtgactggataaatgaacaatgaagcagtgggtggatgaaatgcacagaatgtggcccaaagaaggaagtcgggcacaagctgattacaaataatatattttttaaaatacaggccaggcacggtggctcacgcctgtaatcccagcactttgggaggccgaggtgggcgggtcacctgaggtcaggagttcgagaccagcctggccaacatggcgagaccctgtctgtactaaaaatacaaaaattaggcaggcgtggtggcgggtgcctgtaatcccagctactcagggggctgaggcaggagagtcgcttgaacccgggaggcagaggttgtagcgagccgagatcacaccattgcactccagcctgggcgacagtgcaagactccatctcaaaaaaaaaaaaaaaagccaggtgtggtggcggatgcctgtaatcccagctactcaggaggctggggcaggagaatcgcttgatcatgagaggtgcaggttgcagtgagccgagatcgcgccactgcactccagcctgggctacagtgcgagaccccacctcaaaaaaaagaaaagaaaagaaaaagaaaaaaaaggaaggaagaaagaactagaagaggctacttctccgcttctccctcttccccattcatttccttccttccactccagggcaaaggcagcgagaaaaaggctgtgcagatactgatctgaatttactcccagtgtgactataaacagatccaacacacggtatgtagttttggtcccctttttttcttgtggtaaaatatatgtgacataaaattttccattttaattatttttgtttttattttatttatttattttgagatggagtttctctcttgttgcccaggctggagtgcaatggctcgatctcggctcaccacaacctccgcctcccaggttcaagtaattctgcctcagcctcccgaatagccgggactacaggcacgcaccaccacgcccggctaattttgtatttttagtagagacggggtttctccatgttgaggctggtctcgaactcctgacctcaggtgatctgcccgccttggcctcccaaagtgctgggatgacaggcgtgagccgccacgcccggccccattttaattatttgtaggtgcacagctcattggcattaagcgcattcccattgttgtgcaaccatcaccgccgtcctctccagaaccttctcatcttcccaaactgaaactctgccccgtgaaatactcactccctgtcccctccccagcccctggcaccccccccccccgccatcctacgttctgtctctgtggatcggaggactccagggacctcctaggagtggactcacataggatttgtcctgttgcgactggcttatttcactgagagtgatgttctctgcaacctccgcctcccgggttcaagcgattctcctgcctcagcctcctgagtagctgggattacaggcacccaccaccacgcccagctatttttgtatttttgtagacatggggtttcaccgtgttgccaggctggtctcaggggatccgcccacctcagcctcccaaagtgctgggattacacgcgtgagccaccgcgcccggccctggctaatttttaaaacttttttttttttgtagagacaaggtctctgtgtgtggtctaagctggtcttaactcttgcactgaagcaatccttctacctcggcatcccaaagtggtgggatcacaggcctgagcccctgcacctcccccaggcactgggatcacaggtgggagctgctgcacccagcctatcaagcatgttctgtgtgccaggatcactgacagccctgtgagagggacgctaggaccatgaagaaataccttccgttagtgaactaccaaagagagagaaaacagcttctggccgggtgggtgcggtggctcacaccttgcaatcccagcactttaggaggccgaggcgggtgaatcacgaggtcaggagatcaagaccatcctggctaacatggtgaaaccccgtttctactaaaaatacaaaaaaaaaaaaaaaaaaaaaaaattagccgggcttggtggcgggcgcctgtcatcacagctacccaggaggctgaggtaggagaatcgcttgaacccgggaggcagaggttgcactgagccaaaatcatgccactgcactccaacctgagcaacagagtgagactctgtctcagaaaaacaaaaacaaacaaaacagcttctgaccaggacatgcctgtcctggggcagaatgggggtgtctcctagaggacacgtgggctcagcttgagacagaacgagaaagcggcctgaccaggagagaggctgtctgggcaaggggaagagcgtgtgccaaggcccggggctaaggagctgtgcaagaggtggcaggggcatgtggaggcgttgagcaggcagtgatggggcaggcagctacccagacaaggtggcgcagggaaggccgcgcgcgggagctgtttccgaggctgcctgcgttcacaccgtggccctgctgcaacctgtgaacctcaacctctctgggcctcagtttccctcgtgttaaatgggcataataactgcatctgttaacccgtgcagaacgcacggcaggcaggcaggcaggcaggcaggcagtgctcagggctcatgactgtggccccacgttcagagggggaaggaaaccggctatcagagccaggacgccaccgcagcgggcttgggggcccccaggaaacaggcggggggtgtgcttgaccctaaggggctaccctgggctgggggaggcctaattccacccccgcacaccccagctgcagggccgccggaggaaagggcactgctgggattgagtcctggtctccagaactggaggcgtctttgggcggaatcccccattagggacccggggtctcagatgacccccagcctatgggggtgtgacatgggctcatgaaaggggggcatcagagctctaatgctgggtccccaccctcgtggccaccagaccaccggctttgcttctcaaagcctcagtttccacatctgtaaaatgacagtcggctgctctatggagtagccattcatttttattccttaataaacttgctttcaaaaaagaaaggaaggaaggaaggaaggaaaaacgacagtcatcatagaacctggcgggcgcggtggctcacgcctgtaatcccaacactttgggaggctgaagcgggaggatcgcttgcgcccaggagtttgagaccaacctgggcaacatagcaagaccccgtctctattaaaaaaagacagaactcactgtagcatcttctgaagattaaatgattttaaacacttaaagcacttccaacagcgcctggaagatcctcagattctcacaccccagcgaggagggggcctttctgcggtgctgacagatgaggaatctatggcgcgtaagcggcaaggcggggattccagtccccagcctgcaggttcgcgtccccgggcgcggggctgcggtgcccgctccgcagagggggcaccgaggctccttggggagggggcggccggggccccgaccccactcccgccacctctcgcgtggccgccgctagaggccgctcccggagccgcgcgcgcgcgtcctctcgcgggtccgccccccgggcctgttggacccgcccccggcccacaagcccctgcagggagcgggcccgggcggcgcgcgatcgaggtcgggtcgccgtccagcctgcagcatgagcgcccccagcgcgacccccatcttcgcgcccggcgagaactgcagccccgcgtggggggcggcgcccgcggcctacgacgcagcggacacgcacctgcgcatcctgggcaagccggtgatggagcgctgggagaccccctatatgcacgcgctggccgccgccgcctcctccaaaggtagcccccgcccggcctgcaccgcccccgggggcgcaggggaaactgaggccggggctgccccgacccggggactctgcagcccaccctcccgccggggcgcctctgtctcctcgcctgggaagtggggctgcaggtgggggcacacggaggcgttcacggggagtgcggcaggcgtggggcccgcacacgttaggcaccgcctaagtaccagaaacttcctctccagggggagtgaggccccccgctctccagatggggacctcaaacgtgagacctgggtgaaactgggtggaaccgggtccccagctccctgtctgaggtcgggaggaaggggtcgtgccagggagaggctgcccttctgcctgcctgggagagcagccccgactcgcccggctaagaatagcactcggaaagctgagctcaggragacagctgtccccggggtggccctggcctgcctggcgtcagacgctaagggctgctaagaaaggactccctggccccacacaggccccgtccaggggtygggcctcagtgttcccaccctgaaaatgggcacgtccagtgtccagtgccaatcaggattgagcggggggcccatgtgtggcccacyggggaccagtccttcccctcccagatagtctcaagtccaggtcttgcctggccactcttgcaaatccaactttcggatagagggagggggagagaaaagtaactaacccgagagataagggacccgggacaaacagcgtgggctgggctcaaagtccaaggctctcgcctccccacaggcctggccccaaaagcggccgtcttcggcctccctggctggtcatcctctctctggccgctggccagggcccacgctgttcccgctcaggactactgtgttccgcccgcctctgtccatgctggcccagggtgccctcccgtcctgtggcaaatgtgactcacatagcctagttcagccctgcaccccctcctccaagcagacccccagctcagccctgccctaccctgtgccccctcctccaggaagcctccccagccctgctctgcaccccctcttccagacagcctccccagccctgcatcccctcctcctggcagcctctccagccctgccccgcaccccctcctccaggcagcctccccagcattgccccacaccccctcctccaggcagcctctccagccctgctctgcacgcccccctccaggcagacccccagcccagccctgcgccccctcctccaggcagtctccccagccctgccctgccctgtgcccctcctccaggcagcctcctaagcccgccccacctagtgatgccaggcgccctgtgtctgcccagggggccgggtcctggaggtgggctttggcatggccatcgcagcgtcaaaggtgcaggaggcgcccattgatgagcattggatcatcgagtgcaatgacggcgtcttccagcggctccgggactgggccccacggcagacacacaaggtgcccctctgcccgcaggccctccaggacccccactccttggggtgagggcactgcttcctgggggtkgggggcctggggctgtcagaggtggaggaggtggtcttctctctcgggagtccccctggccgctccctttctgcaggtggggagatcctggggacctctctaccctgtcctctctttttcttttcccctctgcaaggtcatccccttgaaaggcctgtgggaggatgtggcacccaccctgcctgacggtcactttgatggtgaggggtgaggggacgtatcacagggtgggcctccccagctccartgcagcccctcctttgcttgtgggggtccctctgatgtgcactggggggacagagcccaagtgggtgtgggcctggctgtgggatggcggagcaccggggatgggcatgctcacggaggggccctggaggcgatctcggggttctcaagcctgtgtgggagccccacctctacccacggycccgtctcactgcacctccacccgctgggggatgagccgggtgaggctgggtgaggcgctgagcccggccctgaccgcgtgggcttctgttctccgtgcagggatcctgtacgacacgtacccactctcggaggagacctggcacacacaccagttcaacttcatcaaggtggttctctctgacttgctgggatgcgggaggccctcggggaagcccctctgcccacacccccacctccrtcctgaccactggccactccccttccacagaaccacgcctttcgcctgctgaagccggggggcgtcctcacctactgcaacctcacctcctggggggagctgatgaagtccaagtactcagacatcaccatcatgtttgaggtgcgcccacctgaagttccccatgggtctccaggaagtgaccttggatgggggtgggaaggggctgctggagccaccttgctacctggggagggtcccttcctgaccccctgggtgggctggactgtgctggttcatttagaaatcaaagtcctttgcctggcgcagtggctgccaggagcagtggctcaggtctataatcccagcactgtggaaggccgaggtgggcagattgcttgagcctaggagttcaagaccagcctgggctacagagcaagacctcatctttcctaaaaaaaaaaaatacaaaaaactagctgggcgtggtggcgtgtgcctgtactcccagctacttgggaggctgaggtaggaggattgcttgggccccaggggcagaggttgcagtgagcccagatcgaaccactgcactccagcctgggtaacagagccagaccctgtctcaagaaaaaagaaagaaagaaagaaagaaagaaaatttaaaaaaaaaatggaaatcaggctgggcgtggtggctcacacctgtgatcccggcacttcggaaggccaaggcgggtggatcacttgagcccaggagtttgagcctagcctggccaacatggcagaatcccatctctactaaaaatacaaaagttagccaggcgtggtggcgggcgcctgtaattccagctactcgggaggctgaggcatgagaatcacttgaacatgggaggcggaggttgctgtgagccgagattgcaccgttgtactccagcctgggcaacagaccgagactccatctcaacaaaacaaaaacaaaaaaaatggaaatcaaagtccctcaccagctcaacaacctcccatggctccccagtgccctgtggttcagcctaagccctgcgtgttcccctccctccagctgcctccacctggctgtctttgctggttcagcagtgcttgtctcgctgttccctctgcctggtggaggcggcctatctgagaagggctctatgtggttgccctgggctgctgttgtgagagccggctgggtgcctgtggcccctggggcagcttttcttccaaaatgggaactagtggcctgtgttctttttctggtgtgattctttggctccacccgccacactggcaaggtctggagaactgtggagtaggtgcccgggggtggctcgagtgtggggctggggttccaggacagccgggaagctgctgcccgcactggggagctggagattcccgttcacacctgggcttccagggctgccctgccacgtgcccacgggagctgcagccgcccacccgggccttgccatctgtaaacactcttcaatgaggggtgggygccagggtgcacgtgacccccatggccctcagaggtgacctggtgccatccccraccaggagacgcaggtgcccgcgctgctggaggccggcttccggagggagaacatccgtayggaggtgatggcgctggtcccaccggccgactgccgctactacgccttcccacagatgatcacgcccctggtgaccaaaggctgagcccccacccyggcccggccacacccatgccctcctccgtgccttcctggccgggagtccagggtgtcgcaccagccctgggctgatcmcagctgtgtgtcaccagaagctttcccggcttctctgtgaggggtcccaccagcccmgggcygatcccagctgtgtgtcaccagcagctttcccagcttctctgtgagggtcactgctgcccactgcagggtccctgaggtgaagtaaacgccggcgctgggcttggccagtcggcagtgagcgtgcgactgttacttccagcggctgctccctcacctcccgcccatcccatggacacaggaaaagtgggtgactcccctccaggtttctgagcggccccaggatccgccccgccccccccactgtcttgcccatagcagacatctccagctgatgcccgatgtcccttcctcagatgaaagccacctgaccctttgcagtggggtcagggaagggggtaactaggtcagggtctcagggggtggcagcaccacggccggggtgtgggtgggacaaggatctttgcccaccccaggcaggaacccacttctctgcccgccccagcacaccctgagctcccctcctcccgccccaggaggggcgtggctgctgacagccccgttccccaagcctcccatttccagatgtggtttcctctcaggaggcatcgcccctgctgggcccattgcaggggcagccccacctgcccagccccaggaacatcccgggtcctgcctgtctgtgcccttgtgcccagctggtcaccccatgcctcccactttgccccctgcatccacatgtgtgcagcccgcccatcttcctggggccgtcctgctcgccccctccactgacctccttgccctgagagaaggccggctcctgtgctctgcactctggcccagggctgctgttccgctggctgacgccctgtccccaccccagcatgtcctgcttccaggctgcttgacccggctgggctgggtgcctcttccccacccccgccccagtctcccgggccccatcccagcctggcccgtcataactgccgatccccagaactgtccctggtgtgcagcaggcatgcagggtgggcctgcagagcgaggtcccagcaccggcggcatctggcgctgaacacaggaagatgggacgtttgctgaatgaatgcacgtccctgatgaggcctggacttcgacggatgaaggggctggtggggtggagtcagggttccccgaaagccctgggtggagagggtccccaaagtggggtcagacagcctgtgaggctcacagtcctgccctgcagccctttggtttggaccaggtgccacctccccatctccctggccccagccctcagctaaccagcccatgccaccgcctggaaatgggccagagggcagtggcgacctgcccaagtccacacgcaggccacaggccacactctgaaccccggggcaggctcagacgggctttgctcagcctgccttagggcatagagggagactgagtcagggccctcccaggaaggatgggtgtgcggccttccacgctcgggactttgggccacgatgtccaccccagggtcttcgcagagcagcgggaaaggaccctgctggcaggcacagtgcccgtctctgcccccggctctgctccaaccgcccccagcccaagggcggcacgccgcagggggtctgtgatccccccacgtccccggctcctttcacccacacaccacactgggaggcggcagcccgagggcaggtttattgacaacctcacgggacacaagcaggctggggacaggacggcgacaggctccggcggcggcggcggcggcgctacctgcggtaccagatctgcagcctccgctcccgcttgatcttcctctgcagctgcaggatgccgtagagcagggcctcggccgtaggtgggcagcctgcagggaccttgcctcagtctcgcttcccgcagccggagcccgcgtgaccgcgtgcacagcgcagccggctcggctttggaagggtttcccgggccggcctctgaaggtggaggctgacagccctgggtgggcgcagtgccagggactgggagccggcgcaggggaggtccctgcaggaagagtggggtcctcccctgggcaaggccccactgccctccacccgtggctcatcccgggctgtcacagggacctctcggacaagacgctgacctcactaacccggcccccggccccagccctcaggactcaatgggggccagcgctcagcagacacacttagcagtggggagcagggcccggggctgccctggacggagatggaggcagggaggctgggcggagggaggggaggtggcccagagcccgggcatcccacgaggacccgatgaccctctttctgagccccaagccagagctctttgctggggatcccccagtcccggctgccacgcaggttcagaacaaagggcttgagcaagaggacgaagcccagggcccaacggggacagcaggagtggaaacaggtgagaaaggacaaggccactgcagggcctgggaaagggcggccaggccccacctggcagagctctggcaagtccaggctgctccaagggagggagaagcacagtccgcagggagggagcagcacagtccgcagggagggagggaggagcgaggtccccagggagggaggagcgcggtccgctgggagggaggggcgcggtccccagggagggccgagcgcggtccgcagggagggaggagcgcggtccccagggagggaggagcgcggtccgcagggagggagggaggagcacggtccccaaggagggaggagcgcagtccccagacagggagcacagtccgcagggagggaggagcgcggtccccagggagggaggagctcagtctgcaaggagggaggagtacagtccacactcgcaacttgccccattggtctgcactgcaggggaagacgccaggggcatgggcagagctcctgaccccaggatggacctctctgtgctgtcaagtcacagggaggcccaggctgccctctccactgcccccggggtgacctgaaccgtgcagaacgctgaacaaatcaacgccctttccagggaagcggaatccaaagtcagagcctgttcctccacttttgagaggcaccaggatgtgcctctcgcttgcccaaacccccagactcgggactcagggctgggctctctgcgcatgagctaatgccgcacgcagcacagggtggccaagaacaggactctgtcccctgtcccacatgagcgccacctccaagcctgcctaccgtggaccactgtcaaggtgaacgcccggggggatggccctcgtgggaccacgtgaggtgcaagagtcccacgggatcaccagatataaagaatgttcccggtgcgatgtgaatttcaggtatgcagccaatgctctttttagtgtcagtatagcccaaatattgttgggatatactcgtactaaacaattactactaacagttttcctgatggtcaaattcaccctaacctcacagtcaaactaagcctcccacgttttcatttgccaaatccggccaccccgggtcccagggagtcctgcgtgcccttctgtaaggctgagggcgcgggacagtgtccttggcccccaggaaccttctcgcttggtatttctaactgcaggtctttggtttgtgccaggtaggaccatatgaaactgctgtaaaccaggcgtgtgtcaggaattccactcagcttcccctgctccctctgatccctctgatgcctgaatacatcgccgacttctcacaggggacaggctccactaagaggcagcgctccgagtcggcccatccataggatgggggagcccgccgtctgctgggggtgtgggactccctcacaggggccgccgggctccgtgtggcgctggccctgtctccagctccctcgtgggcggtgcggtcccggccctacctgggatgtagatgtccacgggcacgatgcggtcgcagcccctcaccaccgagtaggaatagtggtagtagcctcctccgttggcgcagctgttggggaggcaccgtgaggggagtgtgccgaagacccgcctgcccaccctccctccacgaggcctcgccccatccccacccgccttcaactgcaggccaggcacctacgaggctggaacttgtcacggagaagcaatgagcaaacacgcacaggctcccagagcctctgtgggaccagtggggcgcaagctcacacgtggctgataactcggggaaaagtgctcccctcccgagggggctcctgaccaccgattcccggggctgggatgtgtcagatcacatgtgtcaacaaaaagccacttcagacagccacagtgccaacacccagcccctgtctatggggcggctgagcctcaccctcgcctgattccggctctgtcagtgaggcgctggggtccacccggggcagggagctggaaaccccaggagaccacacagactccactcccagcactgcttcccacagccgtaaaaatggacataccctgaatgcccagcagtgggagacggttatgaaaactctggaatattctaattaactgtttagaattagattagtaatatgtccacacagtgggatattattcagccaagaaaaggcacgaggctcggacacaggccacagcacggatgcaccttgaggacgtcgcgctcagtgagagacgccggacacagaaggccatgcggcgtgtgatcctgtttctgtgaaatgtccaggacgggcccatccacagagacagggaggggaggtgtgggcaccggggctcggaaggggatgcagagtgactgctgatggggacagcatttcatttgggggtgatgagaatgttctggaattagaggtggtggcctaaaaaccactgaactgctcgctttaaaagggtaaacttatcaagacctgatctctacagaaattttaaaaagtaggcacagtggagtacatctgtaatcccagcactctgagaggctaaggttgggggaccgcttgagcccaggaggtcaaggctgcagtgagctatgactgcaccactgcactccagcctgggcaactcagtgagactctgtctctaaaaaataaaaataataaatattggccaggcatggtggctcatgcctgtaatcccagaactttgggaggctgaggtgggtggatcacgagatcaggagatcgagaccatcctagccaacatggtgaaacctcttctttactaaaaatacaaaaattggccaggtgtggtggcaggtgcctgtaatcccagctactcgggaggctgaggcaggagaatcgcttgaacctgggaggcggaggttgtagtgggctgagatcgtgccactgcactccagcctgggcgacagagctagactccatctttaagtaaataaataaatattttaaaatgttaagagactaaatacctttcaatgttacggggaaatgactaaaaaatgagggcaaggccaggcgtggtggcttatgcctataatcccagcactttgggaggccgaggcaggcggatcacctgagggagttcaagaccagcctggccaacatggtaaaaccccgtctctactaaaaatacaaaaattagctgggtgtggtggtgcatgcctgtaatcccagctacttgggaggctgaggcaggaaaattgcttgaacctgggaggcggaggttgcagtgagccgagatggttccaccgcactccagcctgggttgacagagcaagactctgtctcaaaaaaaaaaaaaaaaagaaaaaaaactaatggcaagtgagaaggctgagattataaaactatctacagcacctgtcatcacttatgtgtgagtaaagcagagaactgggcggaatgtggggtctgctgcgtgggggtggatgggaggaatcgttctggggagaggcccaccagcgcatctgcctagggtggaggcaccgagacggctgaagggcagcgccgggaccacgtgggatttcactgaatgtagatgacacttttgataagcgccatcagggcacggccaggccagcactcacgctacgtctgtccctggagaccccccgccctgcactcacctccccatggagaccacgtagcgcggctccggcatctggtcgtagacctggaagagaggcggggtccgtgcgcagctcactct

SEQ ID NO: 94962 - DNA, 15089 bp, Homo sapiens
aaccaccatgcacctgcccagccgaggtgggggcctcgcacctgttgaggcgctggtggacgtcccagcagcgcttgcagaggagcaggacgccagacaacaccaccagcgtgccccccacgaacagcgacatcaccaccaccagcagcacgtagttgtccaggatggggtctggctctgcctgcgggtgtgcagggggggtcaggtgctgctggcctggacgacctcctgcccctcccacctgtcccctgcacccaccgtggggcgtccagtggcattgtcccacgacgtcgtcagggctactgtggcagtggtggtggtggtggtggtggcggctgtggccatggtggctgtgggctgcattctgaactggggaggagggccctgtggggaggaagcctggtcagctccagctagacctacttctcctgcaggagccactgcagacaagctgggtcttccctgcaggagcaggagcccacacagggggcagtgactcatggagaggtagcagagccggaggcagcctccacccggcttggctctgcccagcgggccccgggggctctctctggacctccatctcccatccccatggcgggggaggaggcctggccctctgagggtgcgcctgtacccatcacaactgcacacagccggtgcggcctgtcctgcaaggtagcgccaggccctggagctcagcgctgggcagggcaagcactcggaggaatggggacgccaaggcggtgcagccggctcgagaaggactccagacgccctgtccgccccatcacgggggtggggggctacccccaccccaagaagttcagctacaccctggcagggcccacccggccatggttgggtagagggagacctcccgctgcctgcgcgccagggagggtgcaggggctgggcgcgtgctcccgggtcacgactccgggaggtggaggtctccccggtgctgagtgctggtgggagtgcaagggacaaagaaggcgcatctgttcccagccccggagaagctggttcccatggcgactgcggagcaggccgcggctgggggggcgggttgccagggagcggcggggagggggcgcgggggcggcggcctgggggggggcggcggcctcgggggggcgggcgcgaagccgcaagatggccgcggccgcctccccgccgtgcccagcccgggcgcccggagcatccccggccgccttacgctcgggggaaactgaggcggggcgcggcaccagggaaaggagccgcctggacgctgtgcggcgcagccgggtggggaggcccgggaatcgcagggggtcggggctggcgccggggtgctcggcggccccaggtcagcaccgcacgcgcgagacctttcccggagcgagaggagcgcacaggcggcagccgctcctgcccttcccggacttccgcccacacgcgacagcgggaaactgaggcccaaagccgggcagggtcccggcgggggctggtgtcctcagcgctcccggtcacaggctgcccgggccctggtactgggggaaggggccgcatatgtaggtcgggaaatgagttcaggctggagggggtggggacaggcgcaggatggtgaccggaggccggggaagatggcaggaggccgaggggaagaggggggctcctgggggaggcggctgcgggagccgagggcggaggttccccacggggcagcaccgcgcccccgagccggccaagggtggggatggcgagccaggggaggcagggacccgacgccagggctgagccgagacgccatcgtcctcgcccgacctcacagggagaaactgaggctggggcggggcctgagcgggggtccctctggaggcagccgggtggggggcgcaaggcccggatctcggtccccacgcccgccggactcctccgcgccctccctccggccgcttagcccacagccggctgcgatccccggcctgtcccccgtccgccccccgcagccccgagcccgccgcgcctacctcagcgccgggacgagcggcccatgggcggcgggctggcggcgggcggctgcgtggcgctcgcggctggctccggcgcccggtggccgcggagcaggcggagaatttatgaatggagagcgcggcgcgggggaggccggcgcgagaggaggggccgcgcacgtgaccgcgttggcggcgcgcccgctccgcgcgcccggtgctgcccggtccccggcccgccgcccccgctgcgctcgccgctgggtctggctggctccgcgccggccaccgcctccccttcccttccggcggggcggggggcggagcctgcgctcccgggcgcccactccgcacgcggagccgccccccgcacccgccgcggcggccgagccccgcccccggcccatcggcacgattcacctcgcccggtcctgaggtcccagggacgcagctgggggtgtcctggaattcacgactctgcagcccgaggtgcgccgcgtgcgcaggagggggtggggtccgggggggcacggactcccctctcacgttgcttggtccgtgggggttctggggcggcacagccagsgcccctcggccacaattcccctttaagctgcacagcccagggtctctggacacaggcgccccgcctgcttccccacgcaggtcccctctggcactgtggaggactcgccatgcctctcctgccccctcccctgtgtgacagcgatcacagaccccggcacaaagctgagcagagcccatcggggcccaaacgtgcactcacagaggcctgctcctcgtggggtgacatcagaacgacacccgcagaaacccaaagcccaaagctgcccccgcttctccctcttagaccatcgaacctcatcctgcagatactcaggccacacacctgccaccagcctggcccgagcgccaccccaacccctctgagcccacgcctaacaccccacagcgcctcctctttctcgtcccaaagaaaggctgacaccgctctggcacgtggctggcccagctcagcctccccgcctctgcccttgcaggtgccctgtacccaggcctctgtccatgcagccagagattcaccccggtttccttcaactccttccccagcttcacagtctcggcgcttctgctcttggctyccagcccatgcctgggtcccctcctctgctacgtccctccaaggccctatgccttgcgccttgcctgttcctgtgtgctgtggggccaccactccgatagctgtgaactccaagggcagccccagggaacctggtgccaggcaaatgggaattgcatgggcaaaggttttgaggcaaaaaagtttgcaagtcaatgcctgtgaaggaagcagagaaatcgtcttgttcccagcaggaccatgacatgggcaggcttcagggttttttgtatttcggttttgctttttggagagacagagtctcgcactgtcgcccaggctggagtgcagtggtgtgatcacggctcactgcaacctccacctcccggattcaagcaattttccagcctcagcccggaaggtagttgggactacaggtgcgcgccatcatgcccagctaatttttgttttgtttttttttgtagagatggaatcttgctatgttgtccgggctggtctcgaacttctgggctcaagagatccttctgtctcagtctcctaaattgttgggactacaggtgtgagcccccacaccccgccaggtttctgatttttaataaagactccctctggctgtgtgaagaaaaggtacctgtactaaacggggggaggctggggcctcctaggcaagagatggtagccgcggtggccatgctgggtgcacaggccgggacagggcggaattccagaggaaccccaggtttggggctggagtaatggcgccctcacccgtgggcgaccctggagtggggactggagggaagtggttccacgagtgagactgagtctattaggcctcccagtttcctggagtggcagctggatatgcggtcctgagagccaggaggtgcacaggtcacgactcgaaaagtgaacaggcctcctcctctgcaccccccgagccagggccaggatgaccaggctccaagtgaccgtcacagcgttggcccggtgggaggagccaggcccacgccttcatcctgagtcggaccagcagggccttcttcaggtgcttgggttccaggggacagtggcgcccgccattgcactggcctgaacacgggcagggggcgagggtgcagcctccggatgtagggagccacggatcgtgtcggattcgcccacagcaggaggcattggatctccctggctgcacccttgtaaagccacagccccagggcctcccctgctccctgcacccctggggtccagcccaccgcgccaggctcaaggccctttccagggagcccgagccccaacccccgccatccccgattccgcattttcccggagcctaaggagcggggctgggggcccggccgggtgccgcagacctgcgtgagcgcgggggcggggcggtgacgtcatagccgcgagcgaggctgcgcgggccgctggctgacggcagcggagccccgagccgcccgcgcacgcgctcctgcgtcagaggcgcacgggggcgacggccaggcaggaggtggggggtcggcgagcgcatctccgggcgcggagcgccctctgccggcgtcgaggagcagcgcgccggggtccgggatccccagcgagccctcccgcgtcgcccgcgctgtgcccctcgccgcggtcgccgtttcctagaacagctgcacctgcagccttccaccctgtcccgtcctgcacactttctcggcttttactgtgatttatttttggcttttgccaccacctaccactacgacctgtttgtttttaaattttatttatttttttgtttgagacagagtcttgctcagtcgcccaggctggagtgcagtggcgcgatctcggctcactgcaacctcccccccccccccccgcccgggttcgagctattctcctgcctcagcctcccgagtagctgggattacaggcgcccaccaccatgctcggctaatttttgtatatttagtagagacgaggtttcgccatgttgaccaggctggtttcaaactcctgacctcaggtgatccgcctgcctcgccctccagatcggataaagtgctggaattacaggcgtgagccaccgcgcccggcctgacctgcttattaatgatctcaaatgtctgctaaataacccccggccccagagtgggattctcactctgttgcccaggctaggcagtggcgcaatsatagctcactgcagcctcaatctccttaggcccaagcgatgctcccgcctcagcctccccagtagctgggaccacaggcgtgcatcaccacgcccggctaattttgattatttgtagagacggggtctccctctgttgcccagactggtctccatctcctggggtcaagtgattctcctgccttggcctctcaaggtgctgggattacaggttggagccaccacacctggcccagagccggaaacttgatgttttcttgatgtctatccagggccctgcatccaatgagcgccccaaaaatctttttttttttttttgtacagacgggtcgggggtgggggcgatctacactattgcccaggctggtttccagctcctggcctcaagtgatcctctggcctcagcctcctaaagcgctggtattacagtcgtgagccaccacgcagccgaatcttgaatttcactgaagttcgttttactccacctcccaggacggtttcaccgcccttatctgaccaccccctggttctgccgcagcccgggccggaacaaaactgcaacccccagaatacctcacgacggggcactgcgtcgtcaacgtcgcgtgcgccctgccgggagtcgtagttcgcgcttgcgctctcgccgggactcctcctcccagacgtccctgcgcgtcgtcctcctcgccctccaggccgcccgcgccgcgccggagtccgctgtccgccagctacccgcttcctgccgcccgccgctgccatgctgcccgccgcgctgctccgccgcccgggacttggccgcctcgtccgccacgcccgtgcctatgccgaggccgccgccgccccggctgccgcctctggccccaaccagatgtccttcaccttcgcctctcccacgcaggttcgggcgctgcgggtcgggaccctccgtggccgccgcccccggagtccagggtccycacccccagggcgcgacccccgcttccgggcccccggacccgcgcgccccggaagccgaggctactcagccctggaccctcggccctgcctctgctgcccgagccctgcgctgccctcgtcccgggcacctccccgagataagcgtctcctgggtgccctccccgatctccctggccaaagcctgggtgtcgccggatcgttgcattcccatttcgcggatcagtagaatgaggcgcaactgttgaggaccaaagctgcaacttcggatccctgcgctgggttgtctcagtgcctcacatcagcgccaggtcctgccctgacccattacttagcaggacaggccgagtgcccggtgggcgcggggccggcctgccccgccatcattccccacgctgttgtctgcaggtgttcttcaacggtgccaacgtccggcaggtggacgtgcccacgctgaccggagccttcggcatcctggcggcccacgtgcccacgctgcaggtcctgcggccggggctggtcgtggtscatgcagaggacggcaccacctccaaatactttggtgagtccggtggagggctgcagggccaggccaggctggggctccacatcccaggtcagtctccgtctcagttgaggctgcgagaaaaaatagttttaggccgggcacggtggctcaagcctgtaatcccagcactttgggaggccgaggcaggtggatcacctgaggtcagaagttcggagaccagcctggccaacatgatgtaaccccgtctcttctaaaaatacagaaaactggccgggtgcggtggctcccgcctgtaatcccagcactttgggaggccgaggcggggggatcacgaggtcaggagatcgagaccatcctggctaacacggtgaaaccccgtctctactaaaaatacaaaaaattagccaggcgtggtggcgggtgcctgtagtcccagctagtcaggaggctgaggagattgtgccactgcactccagcctgggcaacaagagtgaaactccatctcaaataagaaaaatacagttttagcaggtttgtccactgaggagcctgggctggccggtgatgaaagcgaaccagaggggaccctgctctcagccggtttatgactggctctggaccaaccaatgtaggatggtcgaagcaagagatgtaaaaccacccaggcccagtggttcatgcctgtaatctcagcactttgggagactgaagtgggagaatcgcttaagcccaggagtttgagactagccttggcaacatagtgagaccctgtctctacaaaaaataaaaagaaactgaccaggcgaggctgggtgcggtggctcacacctgtaatcctagcactttggaaggccggggtgggagggtctcttgagcccaggagtttgagaccagcctgggcaacatagtgaaatcccatactacaaaaaattagctggttgtagtggtgcacacctgtagtcccagctactcgggaggctgaagcaagaggaccgcttcagccggggaagtcaaggctgcagtgagccaagatcatgccactgcacttcagcctgagcaacaagagtgagaccctgtgccaaaaaaacccctcaaaaaaccatgttgggagggctgatcagattaggggaggaaggtcatttgtgcaggaaaaaaagcagttctaagcctcactggtttccagtggtggccagatttgaactcagcttgcctttggccctgaccccagctcaacccatgggtggtgggtcagagggagggcctctgtccccaggcagtgcttttgggggttcctccagcttctagtcctttcttgcggcccctgttttgttcttctctagcagttgcccgccatgttgggcccagggccagtcctgtgggtctgtttgcacactcaggacacagacttggatgtttgtggagctcctggttcacagggggctctggacttgaccaggggagtccctgaggctgtgcagccctttggggtctcacrccttccccmcgccccattcccccagtgagcagcggttccatcgcagtgaacgccgactcttcggtgcagttgttgrccgaagaggccgtgacgctggacatgttggacctgggggtgagtgtcagagggsacctgaggctcagcaggttggagctgtccaggctgcgggggagggagcgctgggggaccaggagccgggctggggtcgytgctggcccctcaccgcccctcaaccccttgcaggcagccaaggcaaacttggagaaggcccaggcggagctggtggggacagctgacgaggccacgcgggcagagatccagatccgaatcgaggccaacgaggccctggtgaaggccctggagtaggcggtgcgtacccggtgtcccgaggcccggccaggggctgggcagggatgccaggtgggcccagccagctcctggggtcccsgccacctggggaagccgcgcctgccaaggaggccaccagagggcagtgcaggcttctgcctgggccccaggccctgcctgtgttgaaagctytggggactgggccagggaagctcctcctcagctttgagctgtggctgccacccatggggctctccttccgcctytcaagatccccccagcctgacgggccgcttaccatcccctytgccctgcagagccagccgccaaggttgacctcagcttcggagccacctytggatgaactgcccccagcccccgccccattaaagacccggaagcctgactgtgtgctcggctcttgttcctccacctggcccggtgaagccgggagcgtcctgggcccctgctcacgtcctccatgtcccttgcaaatagggcctttgagctcccctggactatgtcccttagggcacctggaggtccgtaggaagcaggctcgagggggtgggtggggtgcagccaggcgggcaggctgctgaccttcaccctacaacggtggggagggtgaaggtcaccagtgatggggacatcggtcagggaggggtgtccctgctgctcctggcgcctctgccgagttcctggtctccaggccttgaccctgagccctgctggcccttggccctgcccaccagcctctggaaagaggcgggccccacccgctcccacgctggccccgccctgtgccagccggtcctgtgggtggccctgcctggccgggtgccgaatctgcagtgtttttggcacctccgtgggcacctaggcttctgggttggccccagatggagtggggtgggcccaggagggggcggctccctggcactgccccgttgggcctgcctcttctcctttccataaccctgggggcgggcaacactggctccagctggtgtgtggacggcgggggctggggtctcctgacctcctcccttccttgggacagggccctgtgcagtggggtaggcagggaattccaggggggtgagtggggagggtgggcctgcctgtgtcactggagctgggatggtgacagagaggccgccccgggcctgtcagcacggacgggcagctcactcccacgtcatggcactatgcgggtgacttgccacagcttcacttgaggcgaggtgccgttgggggccttgcgactctgaggccgccggtcagcagatcaggtattctggaacagcccacggtcccctgcctggctccccctccacttgggcctcgggacacgagtgaccaggcccccacttctccaggaatccgcagcccagggaaggttgtgtcagccaccaggccacaggagcagcctctgcccaggccccccctcccccccgcccccagttccagccccaggtcttcaagttcctgccaggccaccaggaccctataaataagaccaagggcacagctgggacttagcaggggcccagcgggaggagctgctcactccggggacctcccctgcccccaccaccagggagggtgtgaaccttggagccaggcctcaggacacccgagacacctgacactcggagggaacagcccgtgctggctggatgcgtcctggagcaggaggcagtcagggtggggccgggaaccaggcggtcaaggcccttcagtgagggcagcccctggcttagtgaggcagaacagagcacagggtttgtccccatcacacccaggaacaacccactcaaccatggggacgccgagtatgggaaatggtggggaagcgttttagcatgtttattcatttagactggctctgggcatctggtccccaaagggccacacagtggcccctgtgaagcccagcaagttccgacaacccgtgtcccattccactcccgaccagactgaggtgatggtgtccattccactcccgaccagactgaggtgacggtgtccattccactcccgaccagactgaggtgacggtgtccattccactcccgaccagactgaggtgacggtgtgcaggtggcagagccacacacgagaggcaagaggcagggagggaggtgggggctgctggccactcacagggggccccagtgtcctgcttgggctgctcatttggcaccagtccacggctccctccgccacctttgttctcactggaagcagaatgagcctggccctgtagttcccacctggggccccagcccttcatccaagccccattcatcgaccctgcccctcctccctccaactgggtccagttcactaagctcccagaactgctcaagccattcccacttcctggaccatcgtcttttttttttttttttttttttttttttgagaggagtttcgctcttattgcccaggctggagtgcaatggcacaatctcagctcaccacaatctccgtctcccgggttcgagcaatgctcccgcctcagcctcccaagtagctgagattacaggcgcacatcaccacgcctggctaatttttgtgtttttagtacagacagggtttcaccatgttgatcaggctggtctcgaactcctgacctcgtgatccgcccgcctcggcctcccaaagtgccaggattacaggcatgagccaccgcgcccggcctttttttttttttttttttttttgagacggaatctcgttttgtcgctcaggctggagtgccctggcacgatctgggtttattgtaacctccgcctcccgcgttcaagcgattctcctgcctcagcctcctgagtagctgggactacagacacatgccaccatgcccagctaatttttgtatttttagtagagacagggtttcaccatgttggccaggctggtctcaatctcttgaccttgtgatccgcccgcctcggcctcccaaagtgctgggattacaggcgtgagccaccgcgcccgaccgcatcatcttttttatgtgacaaactcctagtcattcctcaaaccgcagcccctgtgacccccttccaagggttatcccagcctctccctctctggcctagccctgacccttcggggctgggtgtgcctgtcaaggtgggggccacggctgccgggagcatgggtggcagccggaaggagacctggggaggagcgcagccctgggaggggcgcccatggccagggtgggggtggaggtggtcaggccagataaagggaggggccagatgagtggacaggaggtgctcccgtaggaatggggtccccttctctaaatagaggggcaggacggggcccacctcaaccaggaccatcctcaaaaagccgacggggaagggtgagatgcacaccacattcgtgtctcattggctgtggcctcagtttcttcatctgtaaaatggggtaatgcccaccccaaaggctgggaaccagtgcatgtcctgcattaatggggggtgatggccccaaagtgatcctgccgcatcccctcaccacactcccacccaccctggagaaactgaggcttggagaggccagttacctcccggggtcacagcatagccggctggtgactggctgggcacaaggcaggcctggcactggctaatcgctccataaatgccctctgaggtcaccattgacagatgcaggaggccagggctggccagggcacccccactctacggcaggtgactccagcctgttttcctggacgacagccgctgactcaggcccctcttcccgtcccccccacgcgggcgcccccaggcggaagcaccgggcctggggcgacaggaagggggcggggcagcgagtcgcgctgtacaccccaaaaccctgtcccgctgacgattcggggtgcatctcagcccgcggcgaggcgggccgagacccttggctcggggcattcaaggggagtccccccatgaactgcgccaagcctgggtcccgggtggcccagccgtcaaggcgccccagggccagggccggcaggcaggggcgggggccagtctgcgtcaccgcccgcccggccccccgcccccctgcccgccctaactccaccccgagggaaggcggcgcggataaaggctgagggccgcgcgcttggcccagaccggcccggccagcgcgcattcggccccggacgaaggtactcgcagcacttggagcgcagaaccggccgcgcccggtgagtgtggaggggggggacctgcgggccgaggaagggtgcccactctagatggctcaggatgcccgcacttttctttgttcttgggacaggagggatcggggagcctccggtcctgggaagccccccggggtgcggggtgggaggggctccgcgcagccagcgccgccctggccggacctcagcccccgccccgccccccggggcactcccccttcaccgcgggtgaccttgaactggttgccgttccgccctccgttgcccagccacacggtcccagtctcccgactacagtctttcgttcccgatcggggttcctcccccgcgcgcagcccagtcgtcttcctcccctgccaggggcagcgcggcgccccctccccgggactccgggcggcgctcccaggcgggcccggcagagggcgcgcccgagctgctgactcaccgcatccccgagcgcgcgcgggcgcagccggggacgccgcgtcacgtcacggctcgagcgggcgcgcctcggggaaacgggttctgcccgcggccggcgggtgggcgcgcggggcccccggcggcagccacccggccacgtcaccgaggtgcgggcgccccgccccggccacaactccgcccccacgcaccacgccctccccggggccgcggccctagcctcaccgtcgcccgcccgccccgggaccccggccacgaggcgcggacttcgcgctcccgcttccgctcgcggcttttcccggacgaaggcggcggggtggccccacgacttcctgcccctcccggcgccgggaacaatggcccgcgccccctcccgctcccggccgctcccttgggatcgcgaggggtaccagacccgtctccagacctgggtcccgcgccccccggggcgcgcccgccctttgttgcgggctccgggcgcttatgaatggctgcgggcgcgggcggggcgggggcgggcgcggagaggcgccagccccgcccccgctgcgctccccttggtcgcctgggcgctgggggcggggcgagggggcgggcccggctgccacgtggggcggtgccgcggcggctctcataggcccgggctcgcggccgactgggcgctcggcgcgcggcgattggccggcgcccggccggcggagtaagtagtgaatgggagggggcggcggccccgccccctggaacgttgatacattataacttttttttcttgttactttcacccccagatcctccgagcggcggcgacggctgttgctaagggaggggacgcgcgaggaagcgcgacccgggcggcagacggcacccagcgccaccagccgagcggcgccccctccccaggacccttaaccgcgccgcgtcccggtcgcgcccgccgccctttgaaggagaagcaagtgccgtccccacccccggaaggcgcccccaggagccggagcgacctcggagcgccactcggattttggatttcggtctcgcattccgcggccgggactttctcgaggaggacgcgcgctgctccgcgcccccgagtgcccggaggacccggcatccggggagcctctcgcccctgtcccggaggcgcggcgaggattggcggcgcccgccgcccccagccccccagcgcgcgccggggatggagccgcagcccggcggcgcccggagctgccggcgcggggcccccggcggcgcctgcgagctgggcccggcggccgaggcggcgcccatgagcctcgcyatccacagcaccacgggcacccgctacgacctggccgtgccgcccgacgagacggtggaggggctgcgcaagcggttgtcccagcgcctcaaagtgcccaaggagcgcctggctcttctccacaaagacacgtaggtaccgcgcgcccccggccggccgccccctcgggccccggcccccgggcgggaacaaagagcgcgccgcgcggggaaggcagggggcggccagacagggggcgggggcgcgccgcgcgctctcgggcgccctctgctcggcctcgcctgcctcggccccctcccccgcccggggtcgccgcacaaaggcggctgcgagggcgtcccgggccgggcttcggcggccccccttgggggcgggcaggaatcccagggcgttgcgggggtcccggctgcgggtgtgggggccgccacc

SEQ ID NO: 94963 - DNA, 21299 bp, Homo sapiens
  misc_feature (1)...(21299): n = A,T,C or G
caggcatggtggctcacacctgtaatcccagcactttgggaggctgagacgggcagatcacgaggtcaggagatcgagaccatcctggctaacacggtgaaaccccgtctctactaaaattacaaaaaattagccaggtgtggtcgagggctcctgtagtcccagctactactcgggaggctgaggcaggagaatggtgtgaacccggtaggcggagcttgcagtgagccgagatcgcaccaccgcactccagcctgggcaagagagcgagactctccgtctcaaaaaaaactttttggctgggtgcggtggctcacatctgtaatcccagcactttgggaggccgaagcaggcggatcacctgaggttaggagtttgaggccagcctggccaacatggggaaactgtctctactaaaagtacaaaaattagggccaggcataatggcttacgcctgtaatcccagcactttgggaggccaaggcgggtggatcacgaggtcaggagttcaagaccagcctgaccaacatggggaaaccccatctccactaaaaatacaaaaattagctgggagtggtgccgtgctcctgtaatcccagctactcaggaggctgaggcaggagaattgcttgaaccctggaggtggaggttgcagtgagccgagttcgtgtcactgcactccagcctggggggatacagcaagactctgtctcaaaaaaaaaaaaagtttttgaaattcaaacaaaatacatatgaaattcaacattttaacacttcaaagtgtacaattcagtgtttttaggacgtgtacaatgttatgagaccatcacctctatctatctagttccagaattttttttttctcttgagacagaatttcgctcttgttgcccaggctggagtgcagtggcacgatctcagctcactgcactgccacctcccaggttcaagcgattctcctgcctcagcctcccaagtagctgggattacaggcgtgcgccaccacacccagttagttttgtatttttagtagagacagggtttctccatgttggtcaggctggtctcaaactcccgacctcaggtgatccgcctgcctaggcctcccaaagtgctgggattacaggcgtgagccaccgcacccagcacagagtattttcattgtccccaaaggaagcccagaccccatcagccttcactctccatctcctcccctaggacctggcacacacacatcccctcctgtctctgtggattggcctgtcctggacatttcatggaaatgggatcacacactgcgtgttcttttgtgcctggcttctctcactgagcatgaggtcctcaggctacatccacattgtggcctgtgtcagagcctcatcattccttttcatggctcagaaatattccagtgtgtggagggatcacattgtgtttatttattcatctgtggatggacatctggggtttttttttttgagacagagtctcactctgttacccaggctggagtgcagtggcgcaatctcagctcactgcaacctccgcctcccaggttcaagcaattctcctttctcagcctcctgaatagctgagattacaggcatgcgccaccatgcccggctatgggctgttttctctttttgagtttgtaaagccgtacaagtgtttgtgtgggcgtatgttttcatttctcttgggtgtatgcctaggagtggaattgctgagtcatatggtgactctttgtgtaacagtttgaggatccaccagactgtttgttgtttttttttttttgagatggagtttcactctttttgcccaagctggagtgcagtggcacgatctcggctcactgcaacctccacctcccaggttcaagcgattctcctccctcggcctcccaagtagctgggattacaggcctgcaccaccatgctcggctaattttggtattttcagtagagacggggtttcactatgttggccaggctggtctcgaacccctgacctcagttgatccgcctgcctcagcctcccagagcgcttggattacaggcgtgagccactgcgcctggccgaccagactgctttctatagcggctgcaccatcttacattttcacctgccctgtgtgtggatcatggcctgacttccgggcctctggctttgctgttatcatccaggccgcccctggcttgggctcagcctctcagtccacccctgcccccagatttgcaggtcactgcttggtctttactccagatgccctttcttgtgtcataaaatccactcctgaggcctgtccgtctcctgaccctccccgccccatgtatctgccccacatctccaattcctctcctccctcaaatccgtcctgccaggcactggcccccttccctgagtcacaagcaatgtctgctaggcgaatccctgctcagtcctcaggctgacttggcggtggcatcacatagccactcccttccctctgcccctagacaccttcctcaccaggtttccaggagacctggcaacctcctgccctttatcctatttagggaacacttatgcagtgctggtgtcaggcgccactctgtgtacattgcaattattagccaattaccctacgaagtgggtgctgttcttgtccctgttttacaagggaggggagaggggacgcacagagaggttgagtaacctgcctgagatcacacagccaggtctgcagctcaggggctgctccagtgtctgtgctgagcctccctcccctcctgctgctgcctcccctccttctccgggcttctgaacaccagcagggctggacttactctcctggactctgctctgctcccaggacctggtccaggctcccggctctaatcttcaccacgtggccaccctgcctgcacgtccatcccccagaccttgccctgaactccagagctcacctcgacctacacgcctccaccctcccacccctcttttcactgctcacagggacagctttgttccctttctccctctttttctcgccctgtggcaccctccccgctctgtgcttgcccctaccgtagttggagccaccccaacctgtggcaagtttgccttcccactccctccctggtctcttgcttctgccctggctcccaacagtcatttcccaacacagcagctccagacattttaccctgaccagcaaggcttcatgggacctgccccaccttgccctctgaccccctcctgccccttccctgccaggaacactccaggtgaggcacagccccagagcctctatcctggctgtgctgtctgcctgatacagctatccccaggcaaccccaggtttcctccctctcctcttctggtttttgtttgttttctgtttgtttggagacagtgtcttgctctgtcgcccaggctagagtgcagtggcgcaatcacagctcactgcagcctcaaccgctgggctcaggcgatcctagatcttcccacctcagcctcccgagtaactgggactacaggtgcgcccaccacgcccagctaatttttaaatttttttgtagaaatggggtcttcctggccgggtgcggtggctcacgcctgtaatctcagcacttcggaaggccgaggcaagcagatgatctgaggtcagaagttcaagaccagcctggctaacatggtgaaaccccatctctaccaaaaatacaaaaaaattagccaggtgtggtggctcacgcctgtaatcccagctactcgggaggccaaggcaggagaatcctttaaacccaggaggcggaggctgcagtgagctgagattatgccactgtactccagcctgggcaacagagcgagactcggtctcaaaaaacaacaacaacaacaaaaaagaaatggggtcttcctatgttgcctaggcttgtctcaaactcctggcctcaaggtgagaaagaaaagttaggtagttagataagaaagcctgcacagaccgggcggggtggctcacacctgtaatcccagcactttgggaggccgaggcgggcggatcatgagggcaggagatggagaccatcctggctaacacggtgaaaccccgtctctactaaaaatacaaaaaattagccgggcgtggtggcaggtgcctgtagtcccagctactcgggaggctgaggcagaagaatggcgtgaacccgggaggtggagcttgcagtgagccgagatcctgccactgcactccagcctgggggacagagcgagattccgtgtcaggaaaaaaaaaaaaagtagcccctgacagccccccaaaaagaatctcaaatatcagtgtaaaaaagtccgtgacttacaactaaaaattacaaaactacaacaaagggatcctcccctctcagcttcccaaagtgctgggattacaggtgtgagctatcgcgcccaatgggatttttttttttttttctcgatggagtcttgctctgtcacccaggctggagtgcagtggtgcgatctcggctcactgcaacctccgcctcccgggttcaagtgattctcctgcctcagcctcccgagtaactgggagtacaggcacccaccaccaaacctggctaatttttgtatttttagtagagacagggtttcaccatgttggccaagctggtctggaactcctgatctcatgctctgcctgcctcggccacccaaagtgctgggattacagtgatgagccaccactgctaatgggatttttgcttgaatctatcctcactgtattccctgacctccccatgtgatactgcagttctcccattctccccatgtcacttagcctccctgctctttcttcttccgtagctttgtcactttctaacgttgttatttattttattttatttcatttcattttatttttgagacagagtcttgctctgttgtccaggctggagtgcagtggcacgatcttggctcactgaaacctccaccttacaggttcacgagattctcctgccttagcctcctaagtagctgagactacaggcacctgccacctggcccagctaattttttgtatttttagtagagacggggtttcaccgtgttagccaggatggtcttgaactcctgatctcatgctctgcccgcctcagcctcccaaagtgctgggattataggcatgagccaccgcgcccggccacgttatttattatattttactaaatcctgtctttatctgaatgcaagggatacttggcctgttttattcaccatcactgtaggttgctgagtaaatgttgaattaacgaatgcatcactgaataagttactgatagcctgcacacagsaagtgttgggctggggttctccgtgaacctggggaagtgaggaggtttgcaaagacaggaagagtctggggtggggagatacccaggctaggctggggagatacccaggctaggctggtggcgctcaggggagaggacagaggtgaggggacttaataagcacctagagagatgcctaagactctcagttaaccgtctaaagtagggacactttattgccattgcacaggtagggaaactgaggcccaagggaattaaccctgacctggccaggagccaatggaggaaaccctgtacagtttgatgcacaaatatttatagagttcccactaggctcccagaccatccctaggagccgagctgccccttgaccccatccaggcctcagtttccccgctcacacttcgcccccgcctcgtgggattctaaactgttgctccaaggtgggagttgaacggaaacyacaactcccgagaggctgtgcggccaaagacacacgagaactacggaggcgagagactcgctcagcyaactgccgctctcgtaaggctcgggctgcccttggcgctgccgatccgagacgttgctgcattcaggcattcgccgacgacagaccagcgcggggcggggttaggcggagggggcctgattcggattcggcgcaggcgcagtccgcgcgggttctcgcrcgsagaaggggtgcgagcrgcggcggcggcggaggctgccatggacgacgaggaggagacgtaccggctctggaaaatccgcaagaccatcatgcaggtgagccgcgcctggtgttgggggcgggggcgcgggcggcgggtgtaggggcccgaggtggggtcgagcacggcgtctcctcgtactctcgtcggagcagcagcgacgaagggccgggccgatacgggaggcccasaggtcgccggggataccaggcgctggacccgacctgagccggcagcggggaagggaggggrtttcgagacgtctgggtgcggtgcttagggrtgggtgggcggcttgggctggtgcggcgcgcgtggcggcgagaggaggaggaagccgcgaatggggacggggggcgcccccagactctgcccttctctgtgattcagcgtcgctatttgtccttgcgtcctgaaccccatggagtcttcagcatccgaggctggcagagttggtggttgggaagcagcgggcgagctggggctttcgatggggacgtggagctcggaacccgtgccttggggtctggggcagatggaggccactgggtcgagtccggtttggaagccgggcacaggcctgaggacctgcggttcagggtattgcctcagccattggggccgtttgagagcttttgctttgtcttgcttcccaccctttgcccttgtcctcagcgaagccccccgcagcctgattcttctttctccgatcctcaaacattgtcagcctgaagtcacatctgtttcggtccctgtcatttttttttttaagagatagggtttcattctgtcgcccaggctgcagtgcagtggtgcaatcatagctcactgcatccttgaactggcctccagcaaccctcctgcctcagcctccctaagtactgggatcacgggcgtgagcctccgcgccccgcctttgtccctgcctttagggtagctctgcaaagtggtttggagggctttgctccctgccaggtttctgtgaggctgggtggacagacggtcttggtcaaggctggacatctctgggagcctctcaggatcatactggtcccatcctgtggtgtgaggctgtrggggcyggrgtggctgtcatggagcacacagtgagtgttcatcccgtttgctgttcacctctgtcctctgcagcagccgcaggtctgacttccgggtcacgagctttggccgccttcctctctctgccctggggtcagctggttctttctctctgcagctgtgccacgaccgtggctatctggtgacccaggacgagcttgaccagaccctggaggagttcaaagcccaatttggggacaagccgagtgaggggcgkccgcggcgcacggacctcaccgtgctggtggcccacaacgatgaccccaccgaccagatgtttgtgttctttccaggtgagcagcgggtcccgggggagttccggtgaagccaccagagcacctgccgaggagccggtcgctagcacccacccccactcgcctggtgcccagcatttgtctctctgcccagtctgggaggaaaactcccctccccttccttgctgtgggtgatgccgttgayctctgacccctctcatgctcagcttctttctagtttccctctcagtccccttctctcttcctgccaacgaggagagtcacaagggcctccccactcacccccagccccccatgtcctttgccctagtgtcccttggctcccccatcctggccgttgggtgcacttccagcttcttggcctggcccaggaggccccgtctgggtcagcgcagcctccttgtgagctgcggcccctgcccgccccagcccattcctccgcaccccatgccccctctcccctgtcagcgtccggtactcgtccctcgagcttgtgctcgggcctcttttcccaggacccctgggaccctcggtttcagcacctgctttgcggaagtctccgcacctgtctgcctccctagtatggctctaaagccctcagcggttgggggattgcaagcgccttaggggcgcagccccacgcccagaattaatcagtggggtgacggagcacgtctgccaaccggacctggtgacgctgctgggtttttttgttttttttttgtttttgttttttgaaaaagagtctcaatctgtcgcccaggctggagtgcagtggtgccatctcggcttgctgcagcctccacctcctgagttcaagcgattctcctgcctcagcttgagtagctgagattacaggcacccaccaccacgcctggctagtttttctttgcattttagtagagatgaggtttcaccatgttggctagactgctttcaaactcctaatctcaggtgatccgcccgcctcggcctcccaaagtgctgggattacaggcgtgagccaccgcgcccagtctttttttttttttttttttttgagactgagtctccctctgtcacccaggctggagtgtgcagtggygcaatctcagctcactgcaacctccacctcccaggttcaaacaatccttccacctcagcctcccaaaaagctaggtttacaggcatacaccatctcacctggctactttttctttttgtattgtttattaattaattaattaatttttttgagacagagtcttgctctgttgcccaggctggagtgcagtggcgcaatctctgcccactgcaagctctgcctcccgggttcacgccattctcctgcctcagcctcccgagtagctgggastgcgggcgtgggctaattttttgtatttttagtagaracgggatttcaccttgttrgccaggrtggtctcgatctcctgacatcgtgatctgcccaccttgacctcccaaagtgctgggattacaggtgcgagccaccgcgcccatcctgtattgttaayagagaccgggtttcaccatgttggccaggccggtttagaactgttgacttcaagtgatccacctgcctcagcctcccaaagtgctaggattacaggtgtgagccaccgcacccggcctcaggtgatgcttcttaaagagagcgtcctggggtgtgaggtctgcttgttggagaggttggtgctgagtcacccgcctccccagaactgcccagggtgggagcctctcagagtcgaaggtctctgcttctccctggtctctgggtgactgaggggtgtcagccccctgtccctgtctccgggtgaatgagaggtttcagccctctcttcccctgtcctgggatcctgcaactcaggcctcgttttgcaaacgcggaagccgaggcccgagcaggagagacacctgtgtggaatggggctggaacctgggtgctctgggctctgggtgggcgagggccacgagggcccaggctcgtgcaggccagcacactctctgtctgcagaggagcccaaggtgggcatcaagaccatcaaggtgtactgccagcgcatgcaggaggagaacatcacacgggctctcatcgtggtgcagcagggcatgacaccctccgccaagcaggtgggcacccctgccccaccccgccagcctctccccctccccagcctcctcccgcaagcagtacccacaggcggcccacgtgccttgggctttgggccaggccagccagggtgccctggaggatgtggccgggatgtccggcaagccccgaccgcctccctcccaccgcgtccatgggccccaccccaggcagccgccgtcctcccccagctctcaggaggggcgtcagggcggagggcactgtgcctctcgccagctcctgtgggctccagccctcggcctggtgcagattccaggagccggaggttctttatcctgagctgatgtccagggggacttgcagaggaggcccggcacggggtcctccaggggcctatccgtgttccccgtctgtctgtcggacactctggagccaggctgctgtgctgtgacgggcagtcagcagagcagtttagtccctggcccaccagctgtggggttcacgcagccacacagagcagcacccctgtatggggaagaggtcgccctgccagctctgagggccgcccctggaagcgtgtgatggatggaaacacatccgagtttccacggccacttcactgctggatgaggctctcgatgagcagagaggctggggaggggcgggctgttgaaggctcctgggctggcggtggggttttctgattcacgacgtrggtgtgttgttggggcacacgagtaagccccaggtagcttgaggcaggaaatggggttggggttgtctgggcccctccgggccgtgccttagagycgctctcttccagtccctggtcgacatggccsccaagtacatcctggagcagtttctgcagcaggagctgctcatcaacatcacggagcaygaggtgggcgcgcgccgcggaatcccgcctgcrtggggccggcagagatgcagcgtttgtgggtggccaggaagatgtgggatctggggcccagggcaggtgttccyattagtgcatggaggacagggttctcaaagggtggccctgggcctgcagcagcygaacccgggagcttcctagaaatgcagatcccggccgggcgcggtggctcacacatgtaatcccagcactttgggaggccgaggcgggcggatcacgaggtcaggagttccagaccatcctggctaacacggtgaaaccccgtctctactaaaaatacaaaaaaattagccaggcgtggtggcgagcgcctgtagtcccagctactcggggagccgagattgtgccactgcactccagcctgggagacagagcaagactccatctcaaaaaaaaaaaaaaaaaaaaaaaatgcagatcccgggcccaccccagcctgtagaatcgggactgctgggagtgtggagggaccctagtgctgggacaggaggagtcccagcaggaggtggctgtgcccagcccgtctgcctcagaagccccaggagctgtgactccgtcccccgcctgtggagccagggtggggtgggtgggctccctgagtgccggggatcggggtggggttcagggctcttgtccgtctgaaggcgcaggggctgtggtggcacctgggagccacgtggggtctcaccagcccttggtgatgcctggtggcttcctctctcggcagctagtccctgagcacgtcgtcatgaccaaggaggaggtgacagagctgctggcccgatagtatcctttccagccccaccggccccgcccctccctgtccctcgagacttccgcgttcccccccacacacacccctgcccccccaacggccctgtctggcattttcctgacggtgcttcgcagtaagctccgagagaaccagctgcccaggatccaggcgggggaccctgtggcgcgctactttgggataaagcgtgggcaggtgagccctgtggggagaaggggccctggggctgctctgagctgaccactcggagaagggggcttctgtccctccccgacagcccctcccccttgatccagggcctggaggggacctcgagaccacacccccaatatccccctcttaaagccagggccactgggcccagagaagagcgtgacccaggttcccagggagcgggtcccacagcccagggtcagccatctcggacccctgccggccatccccagcccgtgtgctgcccgcctgctgtctggtgactgcagtgagacccctcaagcattcgcagcccctgctctctgtctctgcaggtggtgaagatcatccggcccagtgagacggctggcaggtacatcacctaccggctggtgcagtagctaccgcctgacaggtgagacggccgagggacaggcactgaggtggggtcagaggcaggggtgtcrtcccctccgtcgrtgtgcagggctgttcttgctttgtccggcagcaagaccctcctagcaccagcccagctgggcnaccaggcgctcccaggacacccccagacccccagaccccacccgaccgtaggctgcagctcttggggctgtgcgcctggacgggagagtcctggtacgcggggcgtgcgtctctccgccgctgacccaccttagaagcaggagacgttcacctgcagggcagttgtgcggcgggactttccagaagagggtttagaaacctgcccagagaccccagagctgagagaggaggcacagcttcaggccaacccttccctgagtgggcaccttgggagggactggccggagtctcaggagcgggacagcctctgcccatggcgagagcctcccagcttcccctggactctggtcatggcgagctgctgtcctgcaggccgccccacttcacactcagcccaggggtggggctcggcctggtctgacgctggcacggttcctttgaggtcagagctactgcccacgcctgtgtgaccgctgggcacaagggagccgtccggcctctgcactgcggcctgggccgcctcctgccaggcctcccgcaccccgtcacgttcggtgggcgttgtgctgtcctgggcatactggatctgcccctgtcgtgtgaccactctccccctttcctagcccctagaggcggacacacagcgacccccatccctgcaggacaaacgcccctgccctgccagaatccggcccccacagctstcacggctgctgctcctctggactccccaaggcaggtggcctccacccacgttctcccgtcctggggtgaggcttcctgtggcccagcccgccccattcacctgtggatttgtgcgagatgcagcctcagaaggaacaaggcccccagagggaggtcacctgggggcagctggtgccgggtcttcacccagaccacgctgggtcccctctgttgggggtttggggtccgggtctcccaccagccactgcttcctcctgggccctcggccttccacccctcgtcttccctccctcgggggccctgatgcgtggcggcccccrcccggcctcggctctttactccattcacagccrtgcacgcgctcaagccaccagggtgcgagatgccagctctggagttctcggttgttgtaggaggttgggtgttttcaaatggtaaagatgttttgagcaaataaatttgcttgatacagaaaccaggccgactaacaaggtttccagcaggtggccttgcctcacsccaagcacacgaggtcagcctggcaggtgtgccctcctcgmgctggcttcaggggtcagtgtctccccaggccctcgccctgccctcccacttcgtgctcctgggtaaggcgtgagcgtgtctgtctcttcccttcccgtgagggtgtggagttgttctctggcttgtgcagctgtggtttgcggccagttcctcttacagacgtttgggatctggctctacttccccgtttgcttactgtctgatttcagaaggcctcgcctgcccaagtttaacctagccacgtggttctctcacagtagctttattaagatgtaattcaccctcgggcggtcggtggtctgtaacgcgcccactgttctgtgcagcagggtccccagatccccaggccgcggactgtgtgtgtgatggggcagtgcttccccttctctccaaatgtacttttttcaaaattgtcttggccaaagcaagccagacccaaagggacaaacactgatgtcactcctaggaggtcactagagtcgtcagagactggaagtaggatgggggttcccgggactggggagttgggtggggatgggggttcccagggctggggaggagggaggggacagagtgtgtcatgtgcacagttttagtttgggaagatgagaaaattctggaggtggccgggcgcggtggctcacgcctgtaatcccagcactttgggaggccgaggtgggcggatcacctgaggtcgggagttcgagaccagcctgaccaacatggcaaaatcccatcactgcaaaaaatacaaaaattacctgggcgtggtggtgcatgcctgtaatcccagctacttgggagctaaggcaggagaatcacttgaacccaggaagtggaggatcgcttgagctcaggagttaaaagaccagcccgggcaacacagagaaaccccccacctctacaaaaaactttaagattacctgggcacagtggctcacacctgtaatcccaacactttgggaggctgaggcgggaggatcatttgagcccaggaggccgaggctgcagtgagctacgattgtgctcctgtactccagcctgggccacagggtcacaccctgtctcaaaaaaaaaaaaaatgcagttccacaggcgcatgggccacgtttccagtgcttggtggccatgtggggctgacgtgcgaaaccttagagccgggggatacgtccgtcatcgagaacgttttcctggactgccctgggctgcaggtggacgtgacgaggtcattcgatgcctgaccgtctgcacagcctgtggtgaagaccacccgggctcccacctcgcrgggccccgtggcggggggttcccttcctcacacatccctcccctagggggaggcccagggccacgccacggggctctctctgtcccctccctggccccttcttctaagcttgcagctgccacagaaaatcttctaagcttgcagctgccacagaaaacacccgattaaaaactttttatttcagcaaaataaacgtgcctgtgaaagaaccacacggtggcttccgagagaccccactgtgtacctgagccccaggtggccacacctggtgttctggaaaagggagtccagggccagtattcaggccctgctgtactgcaccctggaaactgcaccaaaccccagctccgcccccatccacggctcccagaatggtttctggagtccctgcaacagacctgtgaggagagggcagggcagggcctgcctcctgcktccccgtgatgacctgggggatgcactgggcagggacagcttcctccatccacacagccctgtgggcaccaacaaggccactgtgacttcacacgacagcagtgttccccagctcagctgagccggggtgcaggggacaghacagggcacagtcctgtgccgcaaggccctcgtgctcctggaagcctctgggaggaggcgcccgctggtgggacgtcgaagtccaggcrctctcggcagcgaccccaggacggcgcacctaagctatgccrtggtgcaggggacgtgctggagggacaggagcaggcaagagagaagccacctgtggtcccagccccaccccagctcacacgaattccggctgcctttccctgcaggagcccagtgtcatccgcccgccacggagcctcatggggggcagtggggcctgcagcacgttgttggactggttggtgttgaatcctgagagctgctgggccgggccgtcctcgtccccgtccccgtcctcccgggctgtggcctccagctgctcctcactgccgctgtggctgccagaagccacctctaggctggcctcgctctgctgctgctccaggaagctgaggtggcccagggcactggcctccgatgaggacagcagctcggaggcctcctctaggtccgagtccgaatcgttggacacaactcgggattctaagaaagggagacagatggcggggggagacagacaggagagatggaggagagacaaggggagggacagacaggagagatggggagagacaggagaggggggagagagatggagagacaggagagatggggagagacaggagagatggaggagagacaaggggagggacagacagatggagagacatggcggggaggaggagagagagacaaggggagaaacggaaggagagaggtgttgatagggtctggctctgtgtccccacccaaacctcatcttgtagctcccataattcccacgtgttgtgggagggagctggtggaggatggttgaatcctggaggtgcgtctttcctgggctgttctcatgatagtacgtgggtttcacaagatctgatggtctaaaaactggagtttccggacacaagctctccctttgcctgccaccatccatgcaagatgtgacttgctcctctttgctttctgccatgattgtgaggcctccccagctacatggaactgtaactccattaaacctctttcttttgtaaattgcccagtctcaggtatttctttttgagacagagtctcactctcttgcccgggctggagtgcagtgccatgatcttggctcagtgcaacctctgcctccccggttcaagtgattctcctgcttcagcctcctgagtagctgggattacaggtgccctccaccacacctgtctaatttttgtatttttagtagagatgggatttcaccatgttggtcaggctggtcttgaactcctaacctcaagtgatctgccttgtcctcccaaagtgcgaggattacaggcgtgagccaccgtgcccagcctcaggtatttatttatcagcagtgtgaagacagacaacacaggtgtcccataactagatgcggcactcggccagctgcctctgacaggtggtgctggccccacgtgggtcaaactcccagccccacgcccttctctagaaaaacgggctcctgcaggaaaggcacttagcctgacctggtgcacctggagcctcacaaggcatcagccccacgttcacgttactggtttctgagtgcggggtaggcacctcaaaaggcactgccttgcctgtttttgcagccggttaaaggacactgaatgagtagctcataggtgtggtctccgtggcagacgaaatccacagaatgtgcagcaccgtggaccctgccacgtgtgtacaactaggtcatggcacctgcgcccatgggtggcacacgccagcctcccttggggccgttcgggcagccacacactcacctctgcacccgtccgccgccgcctcctgcagcgggtagaccaccgcctcgcccgcctccaggtacggcacctggacgactacctcagctcgctggttggatgactcgtcctgcaagtgcagaacggaagtcatagaggggccggggctccattttccatgttataaattaacaaacccacccacacagcccgtaacagctactgacacccgctgttgcccaggcggtctgtcctcagccaagagcaaacccgagaaaccgcagcccctaaacacccagggaagatggattgaaagaatacgagacgccgcgtgcagtggctcacacctgtaatcccagcacttcaggaggccaaggggggtgcggatcacttgaggtcagcagttggagaccagcctggccaacaaagtgaaaccccatctctgttaaaaatacaaaaattagccgggtgtggtggccggcgcctgtagtcccagctacgcgggagactgaggcaggagaatcgcttgaacctgggaagcggaggttgtggtgggctgagatcgccccattgcacttcagcctgggcagcaggagcgaaactacaactcccagaaaagaaaatctgaagcggggaattgacctcgcggcggagtgcagtggcagctcgggcaggctgtggacaccgggccagcgtggagcttgtggctgcaggcagcaccgggatgggaaacggggaaggaagctgggggtgaagggtgaggcccaaggccagccccaagggagagtggaggggcggccgcagagcctttgcacctctgccagattcaatgcagacctcgctgagttttttgcataaaagacacaaaaagacagtggcctcccgaacagccctgtccaaaccaaattatctccctgtggttccttgggcttcatccgacaacgactgtccccagcagcgccccctgctccccaagccccgagtggccagccccggtcaggcccacaccctcacctggcccccgggggtctcctccggctcctcctcgaagaccaggccgtagtggacgatgagagtctcgatgacgcgggcctgatggggataatccaccagggaggagagggacacggtggcctcggtgggccgtggccgaagcagcgtgggcccgaacacgatgcccaggttcccgggggtcatcttgttgtcctgctccacctccacgatcctgcggggtgggcaggggccaggtgctgagcggctcccgggaccccgcgccctccactccatatgccgggactcacctgcgtaggtgacgcagcaggtactgcagcgaggcccggttctcaggcggcaggtcccgcaggagctcccgcagccgacctgccagggccaccgccactgcctcgctctccgagccgtcctgccggccccgggacgccgccttggcctcggcctctgccttcaggctgtccttggccagccctacgagctcgtggtagaggcggaaggagatgagcggctcgggaagctgcgcagagtcaagggtcagcaggtgttggtgggcctggcccagcccccacgtgtgcctgccacgcccccagcctcagccccacccccacagagcactggccacaccccaccgagctcgggttccacccagagcggcgtcagtcccctttcccagcccagcgtgagccctgcccctcctacccgggccacgcccgcagctccactccctttctcgctctggccacgcgcgccccgccctgcaggtaccctaacgagctccggctccactcagcatagtctgaccccttcccaaccacctgcgaagtgctggtcccactcccatcccagcccagctccgcccttccccagacatgaccacgcccctagccccagtcccgcccttccccggggatgaccacgcccctggccccagcctcgccccaccaagcccaggccccaccgccagccccgcacttgtctagcctcagccccgcccctagcctcatacgggtccctgccaagcgctgaacacgcccatcttgctctggccacgccccaccgagccccggccccggccccgcccccgcacagcgtcaggtgtgcctctgccgtggccacacccctgccacgtgctgaccaagccccaccccgcccctcctgtccctgtccgtgcctcggcgcagaactggccccgcctcgctcctaccgtgaccacgcccccagcctcagccctgccctgccaggcactgtcccgcccaccctgtcctccccaggcccccgcttgcgccagtcctgctccagctcagtcctgctccagctcccggacccccaccccgcctcctcctgcctggctacgccccttccaggctctgcctggccaccaccggtgggtctcacctgacgcaggtagagcttgaggacgttgctgatgtcgtggggcgaggcctgcgacagctcgaccagctccttgccgttctcgaaggcctggcacagcttctccacgcgtgtctttaccccattgacccggtagatgccctgcgggagcccgggggtggggaggcccatcagcctcggcccactcccgcctcctcgctgtgagccgcttcctcccccgcctcaccttggtgcgcagcgcccgccgctcgatctcgcagacgcacttcttgacgatgaagggcacgccgtcgggggcgctgcgggccgcgtggctgaagtcctggccgaacagctgcaggcggccttgcagcttcttgtgcccgcactgtatggccagcgtctccagacatttcttgtggcaggccaggcagcactgggggcggccagagtgagtgagcccagccccggggcgcccagctcagcgcagcccccagcggctccaccccacctccccggggcgctcacagcccccacacggcagcttctgcaaacacaagctggacagtggctcgtggcttccaccccaggggtgatcccgcctgccctgtggcctcctctccttcccgccccttggttttctggacacagctccagggcctttgccctccaggtcttctggccacagccccaggactcttcaccctccaggtctgccccctgcctcgctgcctcagagagccaaccctgctccccagaactaaaagagcccaccccaccccctccgttcgcttccttccaaaggcgtccgactgctccctgctctgggccggacattcctgagggcacacaggccggcggtgctgggcaccccaaaggctcccgaaggctcccagctgtccgtcggggcgtcccactcacctcttcacactcagcaccctggaagtagacgtagctgttgcactcgcggcacttggcgggcgtgcggagcttccggagccggtgagtacgggccgccttggacagcccctcgtggcggaacggtccactgggcacggccaccggcagctcgggggtcatgccgttgaggtcagctgcgggcagcacaggcagccggtgtcaccaaggcagctcagggccaggcccatggactgtgtccaaacccccctctctctccagccccgtcaggggaccctcaccctgctcaaaggctgaagccccggctccaccgtctgggtccaccagctcctccgtggacgacatggtaccactggatgacgtccgctcgaacttcttaaagtcccctgggcgggaatcaggactgttcagactcccccagccaggggggccccctccatcaccccggtgggtgatgaaaccctgaggctcaggagaggaggcagctccacaccccagcccgccagagagcctccctcacctgcgccagggccggggtccagcccactgtccgagtctgagatcgagagcggccatgacttgtgaacctggtgtcctcgcccggctggagaaagaggcgtctctggtgaagggccagggtgggtcgcagggagccagcgtccgcccctgggccccgccggacactcacccctgtggtccttggcaggtgtgccctcagtgcacccgccttcttctggggggctcccggcagcctcgggccgcgccacatcactcacgttgaagctgctcttccgggcacgcatgacgggggacctagtggaagaaaccgggaaaaggaggggaggtgatggggggcaagacagcttcatcttcatgcccccgacagagggaagcccggctcccaggcagggccttgtgcgccggggacagggcagctgggtggcggtaccaggcgttggcggagacgtggggctcaaagtcgtagtgcacatcgg

SEQ ID NO: 94964 - DNA, 14857 bp, Homo sapiens
agctgtgattgcgccactgcactctagcctgggcgacagagcaagacactgtctccaaacaaacagaaaacaaacaaaaaccagaagaggagagggaggaaacctggggttgcctggggatagctgtatcaggcagacagcacagccaggatagaggctctggggctgtgcctcacctggagtgttcctggcagggaaggggcaggagggggtcagagggcaaggtggggcaggtcccatgaagccttgctggtcagggtaaaatgtctggagctgctgtgttgggaaatgactgttgggagccagggcagaagcaagagaccagggagggagtgggaaggcaaacttgccacaggttggggtggctccaactacggtaggggcaagcacagagcggggagggtgccacagggcgagaaaaagagggagaaagggaacaaagctgtccctgtgagcagtgaaaagaggggtgggagggtggaggcgtgtaggtcgaggtgagctctggagttcagggcaaggtctgggggatggacgtgcaggcagggtggccacgtggtgaagattagagccgggagcctggaccaggtcctgggagcagagcagagtccaggagagtaagtccagccctgctggtgttcagaagcccggagaaggaggggaggcagcagcaggaggggagggaggctcagcacagacactggagcagcccctgagctgcagacctggctgtgtgatctcaggcaggttactcaacctctctgtgcgtcccctctcccctcccttgtaaaacagggacaagaacagcacccacttcgtagggtaattggctaataattgcaatgtacacagagtggcgcctgacaccagcactgcataagtgttccctaaataggataaagggcaggaggttgccaggtctcctggaaacctggtgaggaaggtgtctaggggcagagggaagggagtggctatgtgatgccacmgccaagtcagcctgaggactgagcagggattcgcctagcagacattgcttgtgactcagggaagggggccagtgcctggcaggacggatttgagggaggagaggaattggagatgtggggcagatacatggggcggggagggtcaggagacggacaggcctcaggagtggattttatgacacaagaaagggcatctggagtaaagaccaagcagtgacctgcaaatctgggggcaggggtggactgagaggctgagcccaagccaggggcggcctggatgataacagcaaagccagaggcccggaagtcaggccatgatccacacacagggcaggtgaaaatgtaagatggtgcagccgctatagaaagcagtctggtcggccaggcgcagtggctcacgcctgtaatccaagcgctctgggaggctgaggcaggcggatcaactgaggtcaggggttcgagaccagcctggccaacatagtgaaaccccgtctctactgaaaataccaaaattagccgagcatggtggtgcaggcctgtaatcccagctacttgggaggccgagggaggagaatcgcttgaacctgggaggtggaggttgcagtgagccgagatcgtgccactgcactccagcttgggcaaaaagagtgaaactccatctcaaaaaaaaaaaaacaacaaacagtctggtggatcctcaaactgttacacaaagagtcaccatatgactcagcaattccactcctaggcatacacccaagagaaatgaaaacatacgcccacrcaaacacttgtacggctttacaaactcaaaaagagaaaacagcccatagccgggcatggtggcgcatgcctgtaatctcagctattcaggaggctgagaaaggagaattgcttgaacctgggaggcggaggttgcagtgagctgagattgcgccactgcactccagcctgggtaacagagtgagactctgtctcaaaaaaaaaaaccccagatgtccatccacagatgaataaataaacacaatgtgatccctccacacactggaatatttctgagccatgaaaaggaatgatgaggctctgacacaggccacaatgtggatgtagcctgaggacctcatgctcagtgagagaagccaggcacaaaagaacacgcagtgtgtgatcccatttccatgaaatgtccaggacaggccaatccacagagacaggaggggatgtgtgtgtgccaggtcctaggggaggagatggagagtgaaggctgatggggtctgggcttcctttggggacaatgaaaatactctgtgctgggtgcggtggctcacgcctgtaatcccagcactttgggaggcctaggcaggcggatcacctgaggtcgggagtttgagaccagcctgaccaacatggagaaaccctgtctctactaaaaatacaaaactaactgggtgtggtggcgcacgcctgtaatcccagctacttgggaggctgaggcaggagaatcgcttgaacctgggaggtggcagtgcagtgagctgagatcgtgccactgcactccagcctgggcaacaagagcgaaattctgtctcaagagaaaaaaaaaattctggaactagatagatagaggtgatggtctcataacattgtacacgtcctaaaaacactgaattgtacactttgaagtgttaaaatgttgaatttcatatgtattttgtttgaatttcaaaaactttttttttttttgagacagagtcttgctgtatccccccaggctggagtgcagtgacacgaactcggctcactgcaacctccacctccagggttcaagcaattctcctgcctcagcctcctgagtagctgggattacaggagcacggcaccactcccagctaatttttgtatttttagtggagatggggtttccccatgttggtcaggctggtcttgaactcctgacctcgtgatccacccgccttggcctcccaaagtgctgggattacaggcgtaagccattatgcctggccctaatttttgtacttttagtagagacagtttccccatgttggccaggctggcctcaaactcctaacctcaggtgatccgcctgcttcggcctcccaaagtgctgggattacagatgtgagccaccgcacccagccaaaaagttttttttgagacggagagtctcgctctcttgcccaggctggagtgcggtggtgcgatctcggctcactgcaagctccgcctaccgggttcacaccattctcctgcctcagcctcccgagtagtagctgggactacaggagccctcgaccacacctggctaattttttgtaattttagtagagacggggtttcaccgtgttagccaggatggtctcgatctcctgacctcgtgatctgcccgtctcagcctcccaaagtgctgggattacaggtgtgagccaccatgcctggccaaaaagatcttaaaaaagaaatgaagccacaggacagcccctccccagtccttcctggagccaggggctgctctagaaagatatgtggcaacacagcttcctgcagggacactcaagaacttccgccctcacagggctggagccttgagaggtccccgagactccatttccccgttcgtgaaatggggacactctgggaaaagctgtgaagcccccagcacaaatctctcccagagcctggggccccgttctcagatccgaggtcgcgaccccgtgttttccccacttctgactttatcacaattggcaggaagtcaggaatgggatcaagtctctccgcggagctgtgggtgctgagctgtttttctggcaaccctgaaataaactcccatttcagtgcacatgtttgcaacaaacttaaggaaaacaacaccggcaaaattgcgaacagctgagccttcgcaagggcaagaacagagtcaccagtgtggccctgtcacccggcactgccagggcgggaggaaatgggggggtttcctgagaagtcagacaatgggagttgactccaagaactcagcctctaggggctgggcgggagcaaagccatgtgaacaggcttatgcaagaccaggattcggccagccctgctcagggatccttgcttcactgcctctgccaccaaaccatccatgacgcctctgtgctgcatctggcaggcctgagtcgggggcagtggcgggggcaggctcatagcgccccccaggtcaacccggccctgagtctgtctctgaagaaatattcagtgcagggtcagaaaaggttaagaccttgagggcaacatacaaatcccaagcacctaggcggggtagagtggctcacgcctgtaatcccagcactttgggaggccgaggcaggcggatcacctgaggtcgggagttcgagaccagcctgaccaacatggtgaaagcccgtatctactaaaaacacaaaaattagctgggcgtggtagcacatgcctgtaatcccagctactcaggagactgaggcaggagaatcacttgaacccggaaagcggaggttgcagtgagctgcgatggagccactgcactccagcctgggtgacagaccaagactcctcaaaaaaaaaaaaaaaaaatccaaacccctgcctgtacaggggtcaaagtccaatcacggtgactcagttcccaagtatgagatgagtgtttctgttgccacatgtccaagccacgaagtgaaaaacagagttggaagccaagatgtggggcagtatgggctcgggtgtgcccataccttgtaatgttagaagtgtaagaaaaccctccagacttgtgtttattttctgagcacataccgcgcgtccctgcgtgggcagctgcccctgggggtgggagcccaggaaactccaggttctcagttaagtggtaactgtcttgatgactctcaggtctcagtgcccacattatacaagcggctcagcaaccagacccaggatggggagtcactgaccccctgcgcccatggcaggggtgagggtagggacacccccataagatggagctgtgatgagaagcaaacccaactcagtttggtttcatttacattaaaaaggcaaatcccttggccggatgcggtggctcacacctgtaatcccagcactctgggaggcctaggcgggcagatcacctgaggtcaggagttcgagatcagcctggccaacatggtgaaaccccgtctctactaaaaatacaaaaaaattagctgggtgtggtggctcgctcgtgtaatcccagctactcaggaggctgagtcaggagaatcgcttgaacccgggggctgggtggaggttgcagtgagctgagatagcgccactgcactccagcctgggcaaaagagcaaaaaaactgtgtctcggaaaaaaaaaaaaaaaaaaggcaaatcccggccgagcctttggctcacgcatgtgatcccagcacttttgggaagctgaggctggaggatcacttgaggtcagaagtttgagaccagcctaggcaacatagcgagacccccatgtctacaaaacaataattagccaggaatggtggatgagcctgttgtcccagctactcgggaagcagagacgggaggttcgcttgagcctgggaggtcgaggctgcagtgtgccctgatcgtgccactgcacgttagcctgggcaacacagcaagaccccgtgtcttaaaaaaaaaaaaggtaaataagagttggggacacttttctgcgagttggagaaaccaaaccccctcgacgagtcttaagtagtattctcaggttgtctggcctgcggccgcgctgctgtcaaccagccggataactgcgctgcctcccgacgcgccgccagccaggccacggcctcctagacacaagcgagcatgcgcagtcgccaacaacaagtccgcacgtccggtcccgcccccccttccccgccttcttcccactccggcctcccattggctgacgtcggcgcgagcgctcaacaccgacgcgtctgaccaatgagcgctctggagggcgtggccgtgggaaaggaggygcggaaagccgacgcgcgtccattggtcggctggacgaggggaggagccgctggctcccagccccgccgcgatgagcctcggccgcctttgccgcctactgaagccggcgctgctctgtggggctctggccgcgcctggcctggccgggaccatggtgagctagcgccgcggccgttgccggcccggtgaccgttggggcgggcgcgcgatccctgcctccgctcgccggcgtggggaaccctcaggctccagtgaccttggtggggggcgtctgggggctccccctccccacccccggccgggcacggacgcgggtgaccgtactgcgacgcgctccgcggccctccagaccgttgtaggcgcgcgggctggggtcggggaaggggaaggggttgttccacgcgcgcgggtcgtggtcggggaaggggccgtccaggccgttgcaggcgcgcgtgccggggccggsgtcgggggtccaagcttgcagggggcggggtccgggacggctggggcggagctggaccgttgagggccacggcggggcgtctccgggccgagcggggctgctgcgcccgagcggttgggggcgcggagggctggaaatcccggatcacgcgcccccgggcgccgccccgcccccgcaccttggcctagcgcggtggcgtcacagtcgcgcagtcctgactacggcctccgggccctttgtccccgctagcggcgctcggggtgggggagccaggaggggcgggagacgggcgggtatgggccgcgcgggcgcaggctcccccgggcgccgcaggcagcggtgccagagccggggcaggcggcggccgcgagcccctcggcggcggaaggccccagcgtgcaggcgcaggagggcgcggcgccggcggaagaagccctgtccccgcagcttgcgaccggagatccacgaatgtcccaagtcccaggacccggtgcgcgcggggcccccacaccggctaatgtggcacattttggggttggaaccctctcccggcctccgggtctccggtaaaaccggaccagaagtacaagggggcgtgtgcgtttaaggaggaggagcgttcaggtcttcagggccgcagggcctcggtgtccccgccaccgacccgctcccgatcccttcctgcctcagggtcccgggctcagcctcccgtccacgctccctgctcagcttcctttgccttgcagtgcgcgtcccgggacgactggcgctgtgcgcgctccatgcacgagttttccgccaaggacatcgacgggcacatggttaacctggacaagtaccggtgggcgctcgcctggggtggggcgcggggtcgggccctgggagggggccgtgttcttctgcgctgacgccgccgatcctcgcaggggcttcgtgtgcatcgtcaccaacgtggcctcccagtgaggcaagaccgaagtaaactacactcagctcgtcgacctgcacgcccgatacgctgagtgtggtttgcggatcctggccttcccgtgtaaccagttcgggaagcaggtgggctgctgcgtccccggggcccgcaraggcgggtgggtgggggtcggggtgggctccagcctggagagggcctgggagtgtgcagggggcccggactgagggggtgccagcccccgactcactcacacaccttggccgccacaggagccagggagtaacgaagagatcaaagagttcgccgcgggytacaacgtcaaattcgatatgttcagcaagatctgcgtgaacggggacgacgcccacccgctgtggaagtggatgaagatccaacccaagggcaagggcatcctgggaaagtgcgtgacctctggggacagtacggctgctggggtgggggtgggggggctgctgggatgctcacacctccctggggcagaatggctcatggctcggggggcggttgcggggaggtgctgggactctcacatcgcgtggcctcctgggggtaagatggctcagggggacatagagggctgtggaggcagccagggatgcccacacctttgtggcctcctggggacaggatggctcgggggcctgtggggggctgttgggactctcacactgcatggcctcctggggtaagatggctctgggggggcttgggggcactgtggctgtggaggcagccggggaagctcacacccttgtggcctcctggagacaggacagcttggggactgtggggggctgctggggacgctcacgtccatgtgcttcttttccagtgccatcaagtggaacttcaccaaggtaagggggctgtggggggtaggggaccagcttcccctggccacagccgtggcccagatgggcagcggacaggaagggcagcctcagccccttgcaggggtggccccacagtttggacaccgtctctccacagttcctcatcgacaagaacggctgcgtggtgaagcgctacggacccatggaggagcccctggtaggtcctctctagggascccgcttgaggctcgggggcttgggaggtagctgccctaacccagctttcctccccgacaggtgatagagaaggacctgccccactatttctagctccacaagtgtgtggccccgcccgagcccctgcccacgccctyggagccttccaccggcactyatgacggcctgcctgcaaacctgctggtggggcagacccgaaaatccagcgtgcaccccgccggaggaaggtcccatggcctgctgggcttggctcggcgcccccacccctggctaccttgtgggaataaacagacaaattagmctgctggatctttctgcgtaggggcttggggggcccttttgccaggggcccctccatgtcagggcyagttgccgtcagctgccaggctgggggtgccatggaggtggcgtgttgttgccccctcttcctccaggctcggggggctgtgctggctgcagtgctggggtgcagtgagatctgggcccgttggacacccagccctggctcttaatccgtgcagccccacctgctgtgcacaggcagggcctggtgtagtgccgagtcttggaggagataattctaagtggctgtgcttcctggccccgggccttaactgttaggaggtggctactggggcctcccctggccaggaagcagaagtgcagaggcccgaggaacagcgtggccctggtgctggggatgggttgggcacccacaccggcccttggggcctcacctggctggggggtgtgggggtggctgggtggttactgtttgcacagagtccctccgtgagggctggggatggacaggccaggaggggctggtagagcagtaccagccaccgttcatgggacccgggggctgtctggacacggcctggctgcccacctgcacagctagagggactgcagcctgccagggtggctgatcccagctgcccccactgggggtctgtggaatggacggtccatggcacctgccccagacactgggttgagaggtctgtctctcccagccctcgtcccctctcatccacatggggccagcacaggcagtgggcagaaaggcctggtaaccaggagagcctggggggatgcccacacacccctgcccttccctccctgtcccacaggctgaggagcagactccgtgggaagtaggcaaaaggcacatatatttaaaaaagtcctttacatatgtacatcaraacttgctataaatacatagaaaccgcaggcgccaccctgccagctccgcggcctggggcctgggagaggtgagcgggcaataacttaggggtcagggaagggctgggggagggagaattgcatatattagcaggggtctgccccacggagcccccgagacgcggggccctgagcacctggggtttcctgagtttctagctcttgggaccacccggtttcacggatttcaagggtttgggcccactgagcccttgtgggtgcccagtcccagagcagccacccggagccccttcctacttgggaggagaggcacagagagggccctgccacgccccggcccccagctgtcctgagtgggccccgccagggctgaccaggtgggggcccgggtcgggcgctgaaggcactgcggccagggcctagggctcctctgagcagtggtcaggggaccttggccctgctccccaccgctgctcctaggggagaaacggtccctgtgtcttggggcatgtttcgcctaaaggcgtgtcagagaggagcctgggcgccggggaagggtgggctgaactggatcacgctctgccgctcgggaccaccgcccgccgcgccccccgcccccgcgccctcccccagcgcgccctcggagggcggccccgcgtgcagcgagcgcagcatgtcctccagcacctccttgaagttgatgtcgcagccctggtgcgcgagggccgcagggtcggcctgggcgtcgggggtgcccagcggcacgacgccggggccggcgtccagggacagcggcgccgggaaagagaagtgcgggggcggcgggaaggcctcggccggggggctgtaggtgaggtccagcacctctccggggccgcaaggcagcgccagcgggcgcggggcgggcggggcggggcagcccagggcgggcgcctgcctgcgcttcacgtccgcatccatcagccgcagctcctgcagcacccggcgcacgcagccctcggggatcttgatgcctgcgggcagagcgtcggggtcagggccggcgctgggggctcgggccttcccggggcgcccgccgcccactcacccacttgcttcttcctgtccttggtcttcagccgcacgatctgcaggtagctgctgctgctgacgtcggccatgacggcggcgatgcggccccacacgcgcagcagcgcgccgcacagcatgtagtggtgccgcagccgcagcccctgcaggcagtccttaccctcctgcgccagccggcagtgccggttcctgcggacgagacgggtcgtctcggctcaggcgggtcccaggggcccgcaggctccccaggtgccctgagatctcccgcctcctctcagggtctcgggagcccccgatccccgcctgggtcgccgccatctgccggtttccccctggtccccggcccgccctcaccaggcgctgtggctgcagtgcgtcagcgacaaagcgtagccactctcccagggctccttggcctcctccgcggtgacctrgggacacagggccgcatgagcctgggcggggtcagggccggcaacccgagcgaaagctgcgcccggcggccgcctacccggtggaacttgcggcggaggctgtccagggcctccagctggctctgccggccgatgttgggcttgtacaccgtgaagaactggccgcggttctgctccgccagcaggcagctgggcttgttaccgcggacctgcggaggggggcgttgaggccgcgccccggtccgccccccgcgggccctcctctgggggggtaaccccgcccgaccccaccttgtaggagaggtagaagccgtcataggggcccgtcagcgccagcgacttggcaaaggcgtcctcccacttcaggccgcggtccacgctgatctgccacggcacggggtgggggggtgtgagtgtggtgggggcggggtgggcagagtgtgaggggctgtggggcttcctgctgaccttgtagaagaccacctgcccgtcctgcgggtgcccgggagccaggaacacctgctggctctcctcgtagatctcctcgataccgggagcaaggtctaggggggcgggtggagggtaagtggtgtccaggcctgggactgtgggctggggccagggtcagtcccgtagccggggcgcaccctagagacgaccccccgagagcacaggagagggtgtcctggatcctggcctgacctggcccagcgtggggatggtgcacgtgggccccaacctggcaaccgctcaggtcctaggtaaccccgagcaggctgtgggggatcgtgggagcctgggggccgctcaggtcctatgtaaccccgagcaggctgtgggggatcgtgggagcctgggggccgctcagatcctaggtaaccccaagcaggctgtgaggagattgtaggagcctgggggctgctcaggtgctgggtgaccccaagcaggctgtgggggatcgtgggagcctggttggctgcggcactgctcatgagtgaagtagccatggcccggacccgaccctcatctggacacagggaagtggtcctgatggacaggcctggccccatgaggctggaagcacaggctcgccggcctttcgttcacaacaatgtagcaggtgccccgtgaagcctggggatgagcatggtgggcagcgtgcaccagcctgggcaccttccagagacgtgcacggtgatcccacgagccctgtgcctgcatccgcccagtctcacccagtaccctcgctcacccaggatgcatggcgcttccacgagccccttgcccacctaggccctcgccgtgctcacccacaatgcacrgtgttcccacgagccccgagcccacctgggatgcccggcgttcccacgagcccctcgcccacccgggatgcacggtgttcccacgagcccctcgcccacccgggatgcccggtgttcccacgagccccgagcccacccaggatgcatggcgttcccacgagccccgcacccacacccacccacaccacaccccggcacctgtgctcacccaggatgcccatgtcgtatttgccctcccgcttgtccatctcgatgaggtggtcgaaggtgtctgagaagtactggaacagggcrttctgcttgtgcacctccagccccaggatgcggttcaggaacttggtgatggaacagtctggtaggggagggagccaagcctcaggctgcgctgggaatccctctccctgctttgctcaccacccgaggccaaggttgcatgagatgagagacaggagcgcctctgggcctgggtgtggggcactcacccttctccacgtccaggcagccattccgggactcccggccaccaatrcccacagacagcaggccctgcttcatgtctgcggggagaggggcctcacatgctggtcttcccacccctgcccctccctcgaagcccctagctccttttccagagaccagcagctccctggggggctggggagcagctgcagcctagggccagggccagggccaggagcggagccttttgcctgacttacaggagtgagaacagcatgttcttggggagtaaacccaaaccccaggcccctcagctgccctggaaacccacccggcagctgctgggggccgccttggctccctttgccttcacagccctctctgtccgtgtgtggggaggggtcactcaacacacaaccggcctacaaagcctgctgccccagctgctctggagcccagtgctctgcaacccctgcccctcccaggaagacccccaccagcccagcttaccccggaagaaggtggggacccctccagggtatccctggggcacaggcactttgttctcagtctggctcaggatggtggtgaggacacagtgcagggcccgggtgccatactagggggagaaggtgactcggggaggaggcccagggaggaggctggctttccctggacccctgcctccccagaaccccaccctcccctaggcccctggaccctgccctcccctagactcctagaccccacctcccccagctctcagccacctcctccccgggggtcctagactgggtcctcccccagacccctggatgccacctccctgagcccctagaagcccccttcccccctgggggtcctagacccggccctcctccagaccactgagccccacgtyctccagcccccatctaccccctcccccaggctcttagatccggccctccctagacccctgcccctgccccgccccccaaccctgccttccctgcagtaccttgttctcaaagttgtacttgctgaggtcacgggactccgtggcgcggcggtctccgtgggtcagggccccctgccaggggtggggaggccatcagttggtcacctggggtctggcctctagcaccccacaaagctttggagagccttcctgggcctgtccctggttctcagccccacccccacctgctcaccagactctccaggcgcttggccacgatggaggcgaaccggcgctccccggccagctccgagatgaggaagacatactctggcgcggagacctggttggaccggtgggtgcggcctgggggcagagctgctctcagggcccggccaggcgggggcggggccgagaccatgttgggggcggggccaggcagcgctgggggcggggccggactcaccgaactgctggatggcgcggtcggcgctccacggcagctccaaggtcatgtgcacgcggcgccgctggttctggacacggcggtcggcttggagggagacacccgagctggaggcctccgagatgatggccacgagctagggggaaagaaggggccgggacacggttggtgcaaggcccgccccagcgttgccgccacctcctcacccactaggcccccgctccaggtcaccaggacgtcccggggcagcgagaggcctgcggggcgcggacaccacccgccacacggccactcgcgcccgcacctggcacacacacactccagaagtgcgcgggtccacagtccccggggacccttgggcccctctgtgcctcttgggtcccgtg

SEQ ID NO: 94965 - DNA, 31962 bp, Homo sapiens
  misc_feature (1)...(31962): n = A,T,C or G
gaggatcacttgaggtcaggagttcgagaccagcctggccaacatgccaaaaccccgtctctactaaaaatacaaaaattagccgggcttggtggcacacgcctgtagtcccagctactccggagcctgagacaggagaattgcttgaacccaggaggtggaggttgcagtgggccaagatcgtgccattgcgccggggtgacacagcaagsctccgtctcaaaaaaaaaaaaaaaaaaaaaagaggctgggtgccgtggctcacgcctgtaatcccagcactttaggagttcaaggcaggcggatcacaaggtcaagagatcgagaccatcctggccaacacggtgaaaccccatctctactaaaaaaaaatacaaaaattagctgggcatggtggcaggcgtctgtagccccagctacttgggaggctaaggcaggagaattgcttgaacccgggaggcagaggttgcagtgagccaagatcgcaccactgcagtccagcctgggaaacaagagcaaaacttggtctcaaaaaaaaaaaaaaaagaaatcagagatgccggaaccagggcctggggcctcactgagcaccatctgtgggcatccctgtagtgttttgggctgctgggtgtgaayggagcagggaagacgtccacgtttcgcatggtgacgggggacacattggccagcaggggcgaggctgtgctggcaggccacaggtgaggggtgccaggtagggtcagggtggggcagggttggccctgacgtccttgtgcttccccacccctccacctccagtgaatggactgggctcactgccccacacctgcatggtctctgagacccctgcacctctacctcccacacgcggaccaggccctgagacacccctgtcccttatcagcgtggccctggatgggtgggccctgagacccctgtgttagccaccagtatggtcagggactagccagctctctgagcccccggcgcccccatccccagcgtggcccgggaacccagtgcygcgcacctcagcatgggatactgccctcaatccgatgccatctttgagctgctgacgggccgcgagcacctggagctgcttgcgcgcctgcgcggtgtcccggaggcccaggttgcccaggtgagcccactttgtccccaccgctctcacctcccagggcccacccgacccaggccgtgcctctaaagcctggcccaatcccgcactctctcgccttggctccatccctgtccctgcccccagaccgtgcttccttcccctatacctctgtcccccatcctggtccaatagggatgtggctagcccgcctctttgccccgcaacaccaagttccaccattctcattggtccacccacccttccttccgctgcacgttgcccctctctccttgactctgccttctgtggccctgcccacttgctcctcttctgcctaccccctagggcttcgcgcctttctcgctggggtcacggtcacattctcactctggccgttcccagtttgcagccgtttcactgcctcttccatctgcttgggggtcttgtctttgccctggcccgccccaccctcacactgtcccaccccatgccctttctggccctgcctcatacccatgttggctccacccacaccatggccctgctccatacccatcccagctccacccataccaaggccccaccccatactcatgctggctccacccacaccatggccccgccccatactcatgctggctccacccacaccatggccccgccscatactcatgctggctccacccacaccatggccccgccccatactcatgctgcctccacccacaccatggccccaccccatactcatgctgtctccacccacaccatggccctgccccatactsatgctggctctacccacaccatggccccgccgcatactcatgctggctccaccagtgtggccccgccccatactcatgctggctccacccacaccatggccccgccccatactcatgctggctccaccagtgtggccccgccccatactcatgctgtctccacccacaccatggccccgccccatactcatgctggctccacccacactatggccctgccccacacccatcccagctccacccacaccatggccccgccccatactcatgctggctccacccacaccatggccccgccccatactcatgctgcccccaccacactatgtcccattctcacatttgccctgccccatgcccattgtgcccctgctccacactcaatgctggccccgccacactgtggccctgccccatactcatcaatatgagtccccatgcctactctggccccaccccacagaccgctggctcgggcctggcgcgtctgggactctcatggtacgcagaccggcctgcaggcacctacagcggagggaacaaacgcaagctggcgacggccctggcgctggttggggacccagccgtggtgtttctggtgcgtgggagcggtgcctgggtggggtggggcctgcgacggaggcggggccttgcttatgggatcttccgtgctccccaggacgagccgaccacaggcatggaccccagcgcgcggcgcttcctttggaacagccttttggccgtggtgcgggagggccgttcagtgatgctcacctcccataggtgggccgggctctgatgccctgggctgtggttaaggtgatccaggcctggagagagagccccaaagtacaaggccacaggggatggggggtcctggccctagtggggcgagggcgccaggccccggggtgtaaggacacacagaggtgggacgcggcgccgggatcagaacggtctggggaagagtggggagatgtccacaccagaagggtggcccaggccgggggaagcaggcagtgtggcgccaggcacaggtggccccggcctcacggagctcgtggtgccgggtcccgacagcatggaggagtgtgaagcgctctgctcgcgcctrgccatcatggtgaatgggcggttccgctgcctgggcagcccgcaacatctcaagggcaggtgagccggcgcggcctccaggcaggtgtggggtgagggtgggcacgtaggtaggctcaggggagaggccagacgtagagccgggtgaggaaagtttggctccaactggagagatggccaaggctttagattgtcctgcaggggtgactgagggggcgagacaggctggggtgtgctgggggcgcaggaccaggaggcgtgagccgggggctctgggtggatttagaagacacaatcaggtgtgcgttggagtaggtgcagcctggagaggtgagggtggattgatgggtggagttaggggagggcctggttagtgggcggggccataggaaagtggggcgggggtatttattgtgtgggcgggggtagagtgcaagggcgaaagaggagtgtccgaaaaaggagtcaagtggggtgatagcttcgagagcaacctgggcaacctagggagaccccatctctataaaaaatttaaaaattagctggacatggtggtgtgtgcctgtggtctcagctacgcgggcggggggtggcgggggactgagacgggaggaccacttgatcgctagggtagtacaagtatggggcggggccagagagtattaggggctggagggtgagctgaggtgggacctgggaaaggcccgatccggtagccctggccccactcactgcagattcgcggcgggtcacacactgaccctgcgggtgcccgccgcaaggtcccagccggcagcggccttcgtggcggccgagttccctggggcggagctgcgcgaggcacatggaggycgcctgcgcttccagctgccgccgggagggcgctgcgccctggcgcgcgtctttggagagctggcggtgcacggcgcagagcacggcgtggaggacttttccgtgagccagacgatgctggaggaggtgatcacggcgccggggtcgggctgcgggaggcaggctgggggccaggcccgtgggctgaccgtccctcttgtcccctctgggctgcccaccgctaggtattcttgtacttctccaaggaccaggggaaggacgaggacaccgaagagcagaaggaggcaggagtgggagtggaccccgcgccaggcctgcagcaccccaaacgcgtcagccagttcctcgatgaccctagcactgccgagactgtgctctgagcctccctcccctgcggggccgcggggaggccctgggaatggcaagggcaaggtagagtgcctaggagccctggactcaggctggcagaggggctggtgccctggagaaaataaagagaaggctggagagaagccgtgctggtgaaaccgtgtgcatgtgtgtccttgagccaggctgcacacatgtccacacagctgcctgcacatgcgtctggatatggctggccccttgcaagctgagtgtgcacatacgggccaagtggcgattcataggacacaggtgtgagcgtgcctacagctgaccggatcccagctgtaaatgcctctgtggccagcccaggagttggggatgtgagtgcgggcctcataagggcctggtcacaccgtccctgtccccacgtccctgcgtgcctatgtggggctggcgcctaagggcggtacctgtaagtgcctggccataaagtggggatgaggtcaggactcaggaatgtcctgggaagcttacaggagcccggtgtcccggagcacaggccagggccgggccagaagcccatccgacatccagctgaccctcaccctctgaccccagccctcagcgccatgagtcgggggcaaagagttctcaagggtctgctgggctgggtttgcacttggacctgggcctggagagccagacttggagcaaggggctgtggccttcatgtcctgtgccccagagatctgcccctcccacccgaggtaggtgggaatggggtttgggaaaggaaagaggttggggttttgggattgggggtggggttctggaaggggacagcagggagacttggggagrrgggagagagttcacactgcggggtgggggttgggggaaggtaggaggctgggatctgtatgcctgcagatgccccagctcttggccaatgccgcctcaggctgttatcagcaacgggtgcctgcgtcctgctgcccagcacgtccggtggtccagagtcactggaatgcagcttgggaggcggggctggggaccttagctaagggcaggtctggggcaacatgatatggcccacagggctgctgagaggtaaccaggtgtcctcagcatattctgccgatggtggggtccacaccacactttggggacccctgtgcaggcagcccaggaccaggtggacgtggggacccagacggacgtggggacccagacggacagggcccggtaacctggattgttctgacttcctggacgtctttgcccccagggtttcggttctgggcctcagtttccccacctgtcctcgacctgacccacttcayggggctgcagggcgggtgatgggggggaccctactctgcccggccctgctggggcccggccacaccctagggtctgcaggagaggcggtggagcgggcttgccttcagggaaaagggggctgcaggggcgcagcttcggcctgtgcgtgtgtctggggtctgagggcgaggctccaggagcttggtggcgtctgagcgcgtgtggaggtccgggtctctgcgtgtcatcgtgcacgtgtctgtgcacgcccactcgcgtccgggagtgagagtcagcgccctgcagtcggccgccccgtgcccgccagcgtcaggcaggggctcccggtcccaccccgcgagcggcgcggctccgagctcccgaaggcggaagcggggggcgcggcccggggctgggggcggggcctgcgacctcaccttcgcgcccactccgcagagccgcaggctgaggccgggaagggtcgggggcgaggccgcgtcgccgcctccccgaagccttttcctgttggggggagggcccgccagtgacggccgggcctgtcacgtgggcctgacagctggggagggggtggccggcgacaatgtggtcccgaagcggccagcgccgggagctgcagcgctgagacccccagcccgccccctcgggctcccggccggggccccatcatgttctccaggaagaaacgagagctcatgaaaaccccttccatctcgaaaaagaaccgcgcgggaagccccagcccgcagccctcgggggtgagtggagcccgggtgagacccggagctgacgccgggccgcagggggacagggacccgccctgtgctcggggctcatgctggggcggcggctgggggctcgtgccagctacagcccctaccgggcgggacggcaggggccacagcagagaggccgggaccccggcattcagctcacggtagggaccctgggagtggtggccgcctccctccactccatccagggctggccgcggggcccagggagcaggaagggagggtgccgggttgggacgatgttgtgtttgggccgctgcaggttgggggcttaggcaatctgggggctctrggggccgttgagatgggagggctgtggcctggccattgggctgaaggttgaccgggcagcagatcctctaatgggatccaccaggttcagaggttggggagtgtccccaggcctggggtgtctacaaagctggggkgggggtctacagagcttgggggtccgggatgtctacaaggcctggggctgcccataggctctggggttccatggacctttaggggacagacagagtcagaagtgtgttcacttaaagcacctgcgttgtaggagcctgaggggggcttgaagggctgaggaccctccccacccccaccaggaagtggggacccccctcccgcgcctccccgcaggccccgccccggctgtggtttgggcaaggaccgttgtttgtgaaagctctagggaagaggatgttgggtaacaggtgggggggtacactaccaaatctcggccctgtgacctctggcctttgacccctgtggggtcagggtgatggtggccctccacagccccacttcatttctggggaaactgaggccgtgtccaggccggaaaatccctttaacgagctcccctcggacctgcccaaggagctgcccaggaaggatggggctgacgcggtgttccccggaccaagcctggagccgcccrctgggtcctccggcgtcaaggccacagggaccctcaagcggcccaccagcctgagccgccacgccagcgcggctggcttccccctgtcgggtgctgcctcctggacactgggccggagcyaccggagcccactgacagccgccagcccgggcgagctgcccaccgagggtgccggcccggacgtcgtcgaggacatctcccatctgctggcggacgtggcccgcttcgctgagggccttgagaaacttaaggagtgtgtgytgcrtgayggtgagagccacggggacaccgaggcctgggtggaagacagagccagacccaagggaggatggagrgagggacttggggaggctcagaagggagggaggctcagatggcagggagggctgtgtggaagaggccatgacagctaaggctctgagggatgtgtaggagtttggtgggggagtccctgagcgtacactggctcaagaggstgcccactttattttttttaaaggatctgatggcaattaggagggaaaggcagaggaaatgtcccatgcacaggctcagaaacacggaaacagagaatgcatttgggggccaaggtgtggggtgccgctggtgtaggatgaaggcatgacaacgccaggcagaagggcaatggggagccatagaaggtgttagagcacaggacagatgggggcagatctgtgtcttggaatgaagcaaactgggggttggctgaggtctgggtggagagagattcaggaggcatggcgaggggcaggatggggtcatcaggcggcggaggtgctgggacccagcggcctgcaggccggcagttccgttttctcctccacgcggccgctgacagccctgcttcctgccgagttattttcatctgcttcctgtttgtccctggcagcccaggcgggcacctcatgtgctgccttcagcccccggctcctcccagaaaccacagtgccagggtcatgccaggcgctctgatctgctcccagcagccgcccattttacagatgacgaaactaagtctctagtgaggccctgacccctggctcacccagccagggcagrgcagagccaggactggacctcaagtggtggagtggcctctgcaccttcagggcactagttggggaaggcccggtccccactgggaggagtgggagcccccgggttatctggtcccaggggcgggggctaggctgctttcctggggaaaccctaatctcggttcctttccgatcctggcgcttccttggaggcctggcctgggcggggctcagctcccaggctcctgcaggaggtctgaactgggccagccagggtggggcactttttttttttttttttttgatacagggtcttgctctgttgcccaggctggagtccagtggtgtgattgaggctcactgttaccttgaactcctgggctcaagccatcctcctacctctgcctcccgagtacctgagactacaggcatgagccactgcacctgatttattttattttatttattttatttgagatggtgagatggagtctcactctgtcgcccaggctggagtgcagtggcgcgatctcggctcattgcaaccttcctctctcgggttcaagtgattcttctgcctcaggctcccgagtagctaggactacaggtgcgtgccaccacacctggctaatttttgtatttttagtagagatggggtttcaccatattggccaggttggtctcaaacccctaacctcgtgatccgcatgcctcagcctcccaaagtgctgggattacagcaggcatgagccaccgtgcccgggcttttctttttttctttctttttcttttcttttctttttttttttttttttttgagacagagtctcactctgtcacccaggctggagtgcaggggcgagatctcagctcactgcaacctccacctcctgggttcaagtggttcttctgcctcagcctcccgagtggctgggattgcaggggcgcgccaccgtgcccggctaattttttttctttcttttttttttttttttagtagagatggggtttcaccattttggccaggctggtcttgaactcctgatctcaagtgatccacccacctcggcctcccaaagcgccaggattacaggcgtgagccatcgcgcccggccagtttttgtattttttgtagagaccggggtctccccatattgcgcaggctggtctagaactcccgagctaaaaaccgttctcccggctccgcctcccaaagtgctgggataacaggcctgatccaccgcgcccggctgggggcgccttctgtgcgtctcggggccgccccaggccagagaagaccctggcggctaggatgtgggctctagtcccgatgtttctcagctgctgagaccctggcaagccccttccctctctaggtgtcaggtgacttatctataaaatggggccacctgcatgcagcgatggttgtggggtccaccccacagcttggggacccgcgttcaggcagctaggaggggacccacatggacggtgccaccccgacacttcccgggcttcctcgttcccgggcttcaggtctgggcctcagtttccctgcccgtcctcgaccctccccacctcgaagctctgcggttaaggaaggacccaggctggggcgaacgggaccccagggcggggtttccctcgcgggggcggggcctcctgaccggccggagccggtttggccaccggagacccccatcggtcagctgccaggccccacgcgctcgcggtctccgcgccccgacggctgcgccatgtgtatctgcgggacggcgcacycggtgctggacgagggccccgtgcgctgccgggcgggcccccgaggtgaggggacaggtgccgggcgctgggtcccgccgcgtccgggagcacgtggcgctcgggccgtttgccgcccgcggtgggggagcagcggctgccgcgcgcctggcctggccgtgcgcacctgggcatccctgcgctgcgcaggggtcgcgccggccgccggcttcccgggtagggggtgtgcggggacagccgggggtccgtgcgccggccgcgcgcggagtgccgggtgcccggctggaaggtcccgagaaggggcgtggccggggcctcccagcggcttcccggagctcctggagccccaatcccattcccggagtccgcctcgcatccagcagcgaagacatgttccggtccggggtctcaggcccggcggcggccagcggggtatctctggcgggtgactcggtcggtctcttcccggaggtgacattcacctggggtcttcggtgccgaaagggatggggcacttactttttcagatttcatttcgtatttggggcatcctctgagcggtacagtcaggcgtcaaagctgcccctcccgctggcctctgtcctcccgggtacctttcccctcctacgaattccgtgggtttgtttccactacgtggtgtgtgcctggctctcgatgtttcgcctgtactctctgcttttttcttttctttccttcttttcttttctttccttttctttctttcctttcctttctttttgggatggaggagtctcactctgtcacccagctggagtgcagtggcgcgatctcggctcactgcaacctccgcctcccagcttcaagcgattctcctgcctcagcctcccgagtagccggcattacagaggagtgccaccacgctgctactttttgtatttttagtagaggcagggtttcgccatgttggccaggatggtctcaaactcctgacctcaagtgatctgcctgcctcggcctcaccaagtgctgggattacaggcatgaggcactgtgcttggccctctctgcttttttcttcttccaattgagaacgttcgatgagggcatttagctttttattctttattttatttcttacagagacagggtcttactgtattgcccaggctggtcttgaattcctgggctcaacccgtcctcctgcctcagcctcccaaagtgctggggtcacaggtgtaagccaccacccctggctgaggagggcagtgaaagccaggttccaacagtcagatctgacctcctctgttctaacaccttctatggctccctattgccctggagataaagccaggcaggatccctctgcctggcgttctcacgccttcagagctagcgtagatggaaaagctgtgtgattgttgagaaatggcttcccctctctatgcctcagtttcctcacttaggaagggcagagagagacctggacagggctttgagcagtcctgaggagttagggcagggaaggagcctggtgggctgcatggaggaaggggctgcaggactgtagcttgaaggacaagaggcagtttgctttctggagggacaagaaaagagtgttctgagcagcagagtgcctaggccaacgtctggcctttgttgatctggccggtagcccagggagggacagtgccctccccgcggtctcgaaatgagccccaggcatctgccgtcttccacctctgcctcagtttccccatctgggaacaggagctctnaagagggaggaggtggacagactttccctgggactgggccctacsccactgctcactccgactctccccagcagacctccttgaggcccgccgcccgcgggcccacgagtgcctgggtgaggctctgcgtgtcatgcatcagrtcatctccaagtacccgctgctgaacaccgtggagacgctcaccgcagccggcaccctcattgccaaggtcaaaggtcagcctgctggaacagggctgcgagggctctctgcctagaagggcatcctggaggaggggatgtttgaagtgggttttgaaggatgcataggagtttgacaggcacaagctccctsctgttccccctgggttaagggctccggtcagttcttgcagggatggtcacctcccagagtgggcccacctccttgtccttatctctgcttcccagccttccattatgagagcaacaatgatctggagaaacaggagttcgagaaggccctggagacgattgctgtggccttcagtagcacgtgagcacgggagcctgtggggcagggcaagggagcgtggggggcccgggtgtctctcgatggtgacctcgctggccctgcagagtgtccgagttcctcatgggtgaagtggacagcagcaccctcctagcagtgcctcctggggactcgagccaggtgagtggggtgggccagggccacctgtgtccagcttctggaggccagccgggttcaggtctgcagggcccagacagtcaccctgcttcccctgtgcgccttggtttccctctctgggggaggcagcaaccgtcccctgaagggtgggcactgcccagggccccgcatggggctggtctcacctgcgtctccgtcctacagtccatggaaagcctgtatggaccgggcagtgagggcacgcctcccagcctggawgactgtgacgccggtaagcccccacccagcggcaggcaggcatttgaggggtgggccattgcgggggtcgggccaggmtgagcaggcccccgttccctgcaggctgcctgcccgccgaggaggtggacgtgctgctacagcgctgtgaggggggcgtggatgccgcactgctgtatgccaagaacatggccaagtacatgaaggacctcatcagctacctggagaagcggacgacgctgggtgagagctggkgtcccagcagggtgggtctggagggagggggttctgggtgagctgggaaggccttgtcccagyacctcacacccctctccggcccgcagagatggagtttgccaagggcctgcagaagatcgctcacaactgcagacagagcgtcatgcaggaggtgggggccccgcgggcacggggcgggggtccctgggcccgggtgtgagtctcagccccatttcaagggcccagggaccaagagcaggggcttcccctctacattaacgggggtggctgcagggaccagggagctggtggctgggggtgctggggccgccctgcctccatccctccccacccagtgagccggtgccccacccacagccccacatgccgctcctgtccatctactcgctggccctggagcaggacctggagttcggccacagcatggtgcaggcggtgggcaccttgcagacccagaccttcatgcaggtgcgtggtgcccgggagggcgggctgggcgggggtgtcaccggggtacccactcacggcccgtctcgccccagcccctgaccctgcggcggcttgaacacgagaagcgcaggaaggagatcaaggaggcctggcaccgtgcccagaggaagctggtgaggcgggcgggcgggggcgggcgggggcgggcagcgggcctcggcgcaggcgcagtcccagccccagccccatagcgagggccctgcggcgagctccgcacacgccccggcctcctgcgcatgcgcggcctcgcaggctgggccgccccccccaacgccaagccgggtcggagatgctccagccccgtcgcccccagctctgcctggaaggacccaggagcccggcgctcactgctgtccctgcagaaatggggagaagccgtgcctccctcggttgtaagcagctggtctccgggttgagggagactgatggtctctcaggactgggaaagcgccatgctcctgcatgtattctttttttttttttttttgatacggagtctcgctctgtcgcccaggctgcaggctggagtgccatggcaccatctaggctttcactgcaacctccatctccctggttcaaacaattctsctgtcgcagcgtcccgagtagctgggattacagaagcacgccaccacacctggctaatttttgtatttttagtagagacggggtttcaccatagtggtcaggctggtctcgaactcctgacctcaggtgatccacccgcgtcggcctcccaaagtgctgagattacagacgtgagccaccgcacccacccggcctcctgcctgtattctcttcccacttcgcttttgggttatttcaaagacgccggcgcctttttgtttgtttctttgcttgttttgagataaggtctcgctctgtcacccaggctggactgcagtgacgcaatcatacctcactgcagacttgccttcttgggctgcaatgatcstcccacctcagcctcctgagttcctgggtctacaggcaccagccatcacacccagttcatttttttgtattttttgtatactcactatgttgcccagtttttgtttgctttttagctgtgttaacacggtctgcagtgaaacgcaccctcctagctscttccagcacataccggcaaacacatatctgccctgttttgtacacacgaggacagctcacctcatgccctgttctgctcctgatttttatcctcacctccrtatagagaggctcacccgatatcagtcagcatgaagcagcctgaamcccttttttcggctgtgcagggctcagctgaggagatygagtaggttatttcatggacgtcttgggagtggctgagctgttgctgttacgaacaccattgctatgacaagcttgtgcccctgtctcaaggatgcctgagggatcagtgcccaaaatagaactgctgggtcaaggggcgtgcgtgtatgagctaccctcccaggccacagccctgcttttcctcttctgtgaaccctcagttcttaacctttgcttagttcttatcctttgcttactttgtactggacagtggcttatcattgatttgtcagagctttttacatattagagaacttaggccttaatcatgtgagttttagactccccccattcccctcccacaatttactgtttgacttttgatttttacctgtggcctattttgccaggtagaaacctgtgattgttggcagtagtctttttttttttttttttttttttttgagacaagagcctcactctgttgcccaggctgcagtgcagtggatcgatctcagctcactgcaacctccatctcctgggctcaagcgattcttctgcctcagcctcccaagtagctgggattacaggcgccagccaacatgcctggctaatttttgtatttttagtagagrtggggtttcaccaccttggccaggctggtctcgaactcctgacctcaggtaatctgcccaccttgtccttccaaagtgctggaattataggcataagmcaccgtgcttggctaatttttatatctttggtagagatggggtttcatcatgttggccaggctggtctcgagtagctaggaccacaggtgtgcgccaccacgtctggctaaattttttaatttttttgtagagatggggtctcactatgttgaccaggctggtctcaaactcctggcctcaagtgatcctcctgcctcggcctcccaaagcactgggagtacaggtgtgacccatggcgcctggcggtctcctagtaattggatgagtccgtttgtttgtgtgcgaatctgatggtgcaggttgtgaggtgtggcccccgagcccacaggtttttgactaagtgctcttcctgccaacctgtgggcgcctggcttcctgcctgggcggcttctctgttctcgtctgtgaggagggaagtgaaagcaaaagagcccggagacgctcccgtgggggctggtgtgcgtgtctgcagaggctgccgtgtgagcctctgtgcagagcttggctgcacctcagcttcccgggctgcagagtgggcacacaggacacccatttctccgagtgtcctgttacgggtgcctcctcccgttcttttttttttttttttttttgagctggaatctctgttgcccaggctggagtgcagtggtrcatgcaatcttggctcactgcaaccttcgcctcctgggttcaagctgttcgcgattctagtgcctcagcctcccgagtagctgggattacaagcgtgcaccacaatgcccggctaattgttttaaattttgggtagatacggggtttcactatgttggccaggctggtctcaaactcctgacctcaagtgatccacctgcctcggcctcccaaagtgctgggattacagacgtgagccaccgcgcccggccactcctcctgtttttccgctgccgattgttgtgcagggtcctctgcatgcccagctgggccatggggccttgctgagagagatgggggtggggaggaaaggaggagctggggagactgagtcccatccgaggatagggttggaactggcctcctggctcccacacccacagcaagaggcggagtccaacctgcgcaaggccaagcagggttacgtgcagcgctgcgaggaccacgacaaggctcgcttcctygtggccaaggcggaggaggagcaggctggcagcgcgccgggagcaggcrgcacggccaccaagaccctggacaagcggcggcggctggaggaggaggccaagaacaaggtgagggcgggtggaggcagggctggaggtccctggaggaggagatccaatgcttggtgtgacatttactacctccagacctttgtttttgtttttttgtttttttgtttgtttttgagacggagtcttgctctgtcgcccaggctggagtgcagtggcacagtctcggctcactgcaagctccgcctcccgggttcacgccattctcctgcctcagcctcccgagtagctgggactacaggcgcccgccacyacgccyggctaattttttgtatttttagtagagacggggtttcactgtgttagccaggatggtctcgatctcctgacctcgtgatccgtccacctcggcctcccaaagtgctgggattataggcatgagccactgcgcccggccaatttgttttttggagacagagtctcattctgttgcccaggctggagtgcagtggtgagatctcactgcaacctccgcctcccaggttcacacagttctctgcctcagccaccctgccaccaagcccagctaatttttttgtatttttagtagacacagagtttcaccatcttggccaggttggtctcaaactcctgacctcatgatccacccacttcggcctcccaaagtgctgggattacaggcatgagccaccgcgcccggccccgatttttaaattattattatttttgagacagtgtcttgttctgtcacccaggctggagtgcagtgacgtgatcatggctcactgcagcctctacctcctgggctcaagcaatcttctcgcctcagcctctagagtagctgggaccacaggcgtgtgccgccacacccagctaatttaaaaaaattcttggccgggcgcagtggctcacgcctgtaatcccagcactttgggaggccgaggcaggtggatcacaaggtcaggagatcaagaccatcctggctaacagggtgaaaccccgtctctactaaaaatacaaaaaattagctgggcgtagtggtgggcgcctgtagtcccagctactcgggaggctgaggcaggaaaatggcatgaacccgggaggtggagcttgcagtgagccgagatcgcgccactgcactccagcctgggcgacagaacgagactctgtctcaaaaaaaaaaaaaaattctttataaagatgggggtctcaggctgagtgtggtggctcacacctgtaatcccagccctttgggaggctgagacgggcagatcatatgaggccaggagttcgaaaccagcctgggcaacatggtgaaacccctgtatctctactaaaattacaaaaaattaaccgggtatggtgggtggggggcacctgtaatccgttacttgggaggctgaggcagaattgcttgaacccggtaggtggaggttgcagtgagctgagatcgtaccactgcactccagcctggcctacagagcaagactccatctcaaaaaaaaaaaaaaaaagatggggagggtctcaccatgttgctcaggctggtctcgaactcctggcctcaagcaagtctcccactgtggcctcccgaggcgctgggatgacaggcgtcagccccgcctccctgaggtttctgtctgagtcctgcaccccgggctgaggcctctctctgtgcgccccgcccccaccgcaggcggaggaagctatggccacctaccgcacctgcgtggccgacgcgaagacgcagaagcaggagctggaggataccaaggtgacggcgctgcggcagatccaggaggtcatccggcagagcgaccaaaccatcaagtcggtgcgtggggtgctccggccgcccgggcggggatggtggaccgggcggcctcctcctgacccctccgctctccggtgccgcccgcaggccacgatctcctactaccagatgatgcatatrcagacggcrccgctgcccgtgcacttccagatgctgtgtgagagcagcaagctgtatgacccaggccagcagtacgcctcccacgtgcgccagctgcagcgggaccaggagcccgatgtgcactacgactttgagccccacgtctccgccaacgcctggtaccgccacccagctgccctgtccccggcgcacaaggccctgcctgggagccgggcttccctctgtcgggsgcatgaagatgaagctgtcttgccccccatcacctcccctccttttyccggtttcttccactaggtcccccgtcatgcgtgcccggaagagcagcttcaacgtgagtgatgtggcgcggccsgaggctgccgggagccccccagaagaaggcgggtgcactgagggcacacctgccaaggaccacaggggtgagtgtccggcggggcccaggggcggacgctggctccctgcgacccaccctggcccttcaccagagacgcctctttctccagccgggcgaggacaccaggttcacaagtcatggccgctctcgatctcagactcggacagtgggctggaccccggccctggcgcaggtgagggaggctctctggcgggctggggtgtggagctgcctcctctcctgagcctcagggtttcatcacccaccggggtgatggagggggcccccctggctgggggagtctgaacagtcctgattcccgcccaggggactttaagaagttcgagcggacgtcatccagtggtaccatgtcgtccacggaggagctggtggacccagacggtggagccggggcttcagcctttgagcagggtgagggtcccctgacggggctggagagagagggsggtttggacacagtccatgggcctggccctgagctgccttggtgacaccggctgcctgtgctgcccgcagctgacctcaacggcatgacccccgagctgccggtrgccgtgcccagtggaccgttccgccacgaggggctgtccaaggcggcccgtactcaccggctccggaagctccgcacgcccgccaagtgccgcgagtgcaacagctacgtctacttccagggtgctgagtgtgaagaggtgagtgggacgccccgacggacagctgggagccttcgggagcctttggggtgcccrgcaccgccggcctgtgtgccctcaggaatgtccggcccagagcagggagcagtcggacgcctttggaaggaagcgaacggagggggtggggtgggctcttttagttctggggagcagggttggctctctgaggcagcgaggcagggggcagacctggagggtgaagagtcctggggctgtggccagaagacctggagggcaaaggccctggagctgtgtccagaaaaccaaggggcgggaaggagaggaggccacagggcaggcgggatcacccctggggtggaagccacgagccactgtccagcttgtgtttgcagaagctgccgtgtgggggctgtgagcgscccggggaggtggggtggagccgctgggggctgcgctgagctgggcgccccggggctgggctcactcactctggccgcccccagtgctgcctggcctgccacaagaaatgtctggagacgctggccatacagtgcgggcacaagaagctgcarggccgcctgcagctgttcggccaggacttcagccacgcggcccgcagcgcccccgacggcgtgcccttcatcgtcaagaagtgcgtctgcgagatcgagcggcgggcgctgcgcaccaaggtgaggcgggggaggaagcggctcacagcgaggaggcgggagtgggccgaggctgatgggcctccccacccccgggctcccgcagggcatctaccgggtcaatggggtaaagacacgcgtggagaagctgtgccaggccttcgagaacggcaaggagctggtcgagctgtcgcaggcctcgccccacgacatcagcaacgtcctcaagctctacctgcgtcaggtgagacccaccggtggtggccaggcagagcctggaaggggcgtagccaggcaggaggaggcggggtgggggtccgggagctggagcaggactgagctggagcaggactggcgcaagcgggggcctggggaggacagggtgggcgggacagtgcctggcagggcagggctgaggctgggggcgtggtcacggtaggagcgaggcggggccagttctgcgccgaggcacggacagggacaggaggggcggggtggggcttggtcagcacgtggcaggggtgtggccacggcagaggcacacctgaysctgtgcgggggcggggscggggccggggctcggtggggcgtggccagagcaagatgggcgtgttcagcgcttggcagggacccgtatgaggctaggggcggggctgaggctagacaagtgcggggctggcggtggggcctgggcttggtggggcgaggctggggccaggggcgtggtcatccccggggaagggcgggactggggctaggggcgtggtcatgtctggggaagggcggagctgggctgggatgggagtgggaccagcacttcgcaggtggttgggaaggggtcagactatgctgagtggagccggagctcgttagggtacctgcagggcggggcgcgcgtggccagagcgagaaagggagtggagctgcgggcgtggcccgggtaggaggggcagggctcacgctgggctgggaaaggggactgacgccgctctgggtggaacccgagctcggtggggtgtggccagtgctctgtgggggtgggrctgaggctgggggcgtggcaggcacacgtgggggctgggccaggcccaccaacacytgctgacccttgactctgcgcagcttcccgagccgctcatctccttccgcctctaccacgagctcgtagggctggccaaggacagcctgaaggcagaggccgaggccaaggcggcgtcccggggccggcaggacggctcggagagcgaggcagtggcggtgsccctggcaggtcggctgcgggagctcctgcgggacctgccgcctgagaaccgggcctcgctgcagtacctgctgcgtcacctacgcaggtgagtcccggcatatggagtggagggcgcggggtcccgggagccgctcagcacctggcccctgcccaccccgcaggatcgtggaggtggagcaggacaacaagatgacccccgggaacctgggcatcgtgttcgggcccacgctgcttcggccacggcccaccgaggccaccgtgtccctctcctccctggtggattatccccatcaggcccgcgtcatcgagactctcatcgtccactacggcctggtcttcgaggaggagccggaggagacccccgggggccaggtgagggtgtgggcctgaccggggctggccactcggggcttggggagcagggggcgctgctggggacagtcgttgtcggatgaagcccaaggaaccacagggagataatttggtttggacagggctgttcgggaggccactgtctttttgtgtcttttatgcaaaaaactcagcgaggtytgcattgaatctggcagaggtgcraaggctctgcggccgcccctccactctcccttggggctggccttgggcctcacccttcacccccagcttccttccccgtttcccatcccggtgctgcctgcagccacaagctccacgctggcccggtgtccacagcctgcccgagctgccactgcactccgccgcgaggtcaattccccgcttcagattttcttttctgggagttgtagtttcgctcctgctgcccaggctgaagtgcaatggggcgatctcagcccaccacaacctccgcttcccaggttcaagcgattctcctgcctcagtctcccgcgtagctgggactacaggcgccggccaccacacccggctaatttttgtatttttaacagagatggggtttcactttgttggccaggctggtctcsaactgctgacctcaagtgatccgcaccccccttggcctcctgaagtgctgggattacaggtgtgagccactgcacgcggcgtctcgtattctttcaatccatcttccctgggtgtttaggggctgcggtttctcgggtttgctcttggctgaggacagaccgcctgggcaacagcgggtgtcagtagctgttacgggctgtgtgggtgggtttgttaatttataacatggaaaatggagccccggcccctctatgacttccgttctgcacttgcaggacgagtcatccaaccagcgagctgaggtagtcgtccaggtgccgtacctggaggcgggcgaggcggtggtctacccsctgcaggaggcggcggcggacggktgcagaggtgagtgtgtggctgcccgaacggccccaagggaggctggcgtgtgccacccatgggcgcaggtgccatgacctagttgtacacacgtggcagggtccacggtgcwgcacattctgtggatttcgtctgccacggagaccacacctatgagctactcattcagtgtcctttaaccggctgcaaaaacaggcaaggcagtgccttttgaggtgcctaccccgcactcagaaaccagtaacgtgaacgtggggctgatgccttgtgaggctccaggtgcaccaggtcaggctaagtgcctttcctgcaggagcccgtttttctagagaagggcgtggggctgggagtttgacccacgtggggccagcaccacctgtcagaggcagctggccgagtgccgcatctagttatgggacacctgtgttgtctgtcttcacactgctgataaataaatacctgaggctgggcacggtggctcacgcctgtaatcctcgcactttggraggacaaggcagatcacttgaggttaggagttcaagaccagcctgaccaacatggtgaaatcccatctctactaaaaatacaaaaattagacaggtgtggtggagggcacctgtaatcccagctactcaggaggctgaagcaggagaatcacttgaaccggggaggcagaggttgcactgagccaagatcatggcactgcactccagcccrggcaagagagtgagactctgtctcaaaaagaaatacctgagactgggcaatttacaaaagaaagaggtttaatggagttacagttccatgtagctggggaggcctcacaatcatggcagaaagcaaagaggagcaagtcacatcttgcatggatggtggcaggcaaagggagagcttgtgtccggaaactccagtwtttagaccatcagatcttgtgaaacccacgtactatcatgagaacagcccaggaaagacgcacctccaggattcaaccatcctccaccagctccctcccacaacacgtgggaattatgggagctacaagatgaggtttgggtggggacacagagccagaccctatcaacacctctctccttccgtttctccccttgtctctctctcctcctccccgccatgtctctccatctgtctgtccctccccttgtctctcctccatctctcctgtctctccccatctctcctgtctctccatctctctcccccctctcctgtctctccccatctctcctgtctgtccctccccttgtctctcctccatctctcctgtctgtctccccccgccatctgtctccctttcttagaatcccgagttgtgtccaacgattcggactcggacctagaggaggcctccgagctgctgtcctcatcggaggccagtgccctgggccacctcagcttcctggagcagcagcagagcgaggccagcctagaggtggcttctggcagccacagcggcagtgaggagcagctggaggccacagcccgggaggayggggacggggacgrggacggcccggcccagcagctctcaggattcaacaccaaccagtccaacaacgtgctgcaggccccactgccccccatgaggctccgtggcgggcggatgacrctgggctcctgcagggaaaggcagccrgaattcgtgtgagctggggtgrggctgggaccacaggtggcttctctctygcctgctcctgtccctccagcacgtcccctgcaccayggcatagcttaggtgcgccgtcctggggtcgctgccgagagygcctggacttcgacgtcccaccagcgggcgcctcctcccagaggcttccaggagcacgagggccttgcggcacaggactgtgccctgtdctgtcccctgcaccccggctcagctgagctggggaacactgctgtcgtgtgaagtcacagtggccttgttggtgcccacagggctgtgtggatggaggaagctgtccctgcccagtgcatcccccaggtcatcacggggamgcaggaggcaggccctgccctgccctctcctcacaggtctgttgcagggactccagaaaccattctgggagccgtggatgggggcggagctggggtttggtgcagtttccagggtgcagtacagcagggcctgaatactggccctggactcccttttccagaacaccaggtgtggccacctggggctcaggtacacagtggggtctctcggaagccaccgtgtggttctttcacaggcacgtttattttgctgaaataaaaagtttttaatcgggtgttttctgtggcagctgcaagcttagaagattttctgtggcagctgcaagcttagaagaaggggccagggaggggacagagagagccccgtggcgtggccctgggcctccccctaggggagggatgtgtgaggaagggaaccccccgccacggggcccygcgaggtgggagcccgggtggtcttcaccacaggctgtgcagacggtcaggcatcgaatgacctcgtcacgtccacctgcagcccagggcagtccaggaaaacgttctcgatgacggacgtatcccccggctctaaggtttcgcacgtcagccccacatggccaccaagcactggaaacgtggcccatgcgcctgtggaactgcattttttttttttttgagacagggtgtgaccctgtggcccaggctggagtacaggagcacaatcgtagctcactgcagcctcggcctcctgggctcaaatgatcctcccgcctcagcctcccaaagtgttgggattacaggtgtgagccactgtgcccaggtaatcttaaagttttttgtagaggtggggggtttctctgtgttgcccgggctggtcttttaactcctgagctcaagcgatcctccacttcctgggttcaagtgattctcctgccttagctcccaagtagctgggattacaggcatgcaccaccacgcccaggtaatttttgtattttttgcagtgatgggattttgccatgttggtcaggctggtctcgaactcccgacctcaggtgatccgcccacctcggcctcccaaagtgctgggattacaggcgtgagccaccgcgcccggccacctccagaattttctcatcttcccaaactaaaactgtgcacatgacacactctgtcccctccctcctccccagccctgggaacccccatccccacccaactccccagtcccgggaacccccatcctacttccagtctctgacgactctagtgacctcctaggagtgacatcagtgtttgtccctttgggtctggcttgctttggccaagacaattttgaaaaaagtacatttggagagaaggggaagcactgccccatcacacacacagtccgcggcctggggatctggggaccctgctgcacagaacagtgggcgcgttacagaccaccgaccgcccgagggtgaattacatcttaataaagctactgtgagagaaccacgtggctaggttaaacttgggcaggcgaggccttctgaaatcagacagtaagcaaacggggaagtagagccagatcccaaacgtctgtaagaggaactggccgcaaaccacagctgcacaagccagagaacaactccacaccctcacgggaagggaagagacagacacgctcacgccttacccaggagcacgaagtgggagggcagggcgagggcctggggagacactgacccctgaagccagctcgaggagggcacacctgccaggctgacctcgtgtgcttggggtgaggcaaggccacctgctggaaaccttgttagtcggcctggtttctgtatcaagcaaatttatttgctcaaaacatctttaccatttgaaaacacccaacctcctacaacaaccgagaactccagagctggcatctcgcaccctggtggcttgagcgcgtgcayggctgtgaatggagtaaagagccgaggccgggcgggggccgccacgcatcagggcccccgagggagggaagacgaggggtggaaggccgagggcccaggaggaagcagtggctggtgggagacccggaccccaaacccccaacagaggggacccagcgtggtctgggtgaagacccggcaccagctgcccccaggtgacctccctctgggggccttgttccttctgaggctgcatctcgcacaaatccacaggtgaatggggcgggctgggccacaggaagcctcaccccaggacgggagaacgtgggtggaggccacctgccttggggagtccagaggagcagcagccgtgagagctgtgggggccggattctggcagggcaggggcgtttgtcctgcagggatgggggtcgctgtgtgtccgcctctaggggctaggaaagggggagagtggtcacacgacaggggcagatccagtatgcccaggacagcacaacgcccaccgaacgtgacggggtgcgggaggcctggcaggaggcggcccaggccgcagtgcagaggccggacggctcccttgtgcccagcggtcacacaggcgtgggcagtagctctgacctcaaaggaaccgtgccagcgtcagaccaggccgagccccacccctgggctgagtgtgaagtggggcggcctgcaggacagcagctcgccatgaccagagtccaggggaagctgggaggctctcgccatgggcagaggctgtcccgctcctgagactccggccagtccctcccaaggtgcccactcagggaagggttggcctgaagctgtgcctcctctctcagctctggggtctctgggcaggtttctaaaccctcttctggaaagtcccgccgcacaactgccctgcaggtgaacgtctcctgcttctaaggtgggtcagcggcggagagacgcacgccccgcgtaccaggactctcccgtccaggcgcacagccccaagagctgcagcctacggtcgggtggggtctgggggtctgggggtgtcctgggagcgcctggtggcccagctgggctggtgctaggagggtcttgctgccggacaaagcaagaacagccctgcacaccgacggaggggacgacacccctgcctctgaccccacctcagtgcctgtccctcggccgtctcacctgtcaggcggtagctactgcaccagccggtaggtgatgtacctgccagccgtctcactgggccggatgatcttcaccacctgcagagacagagagcaggggctgcgaatgcttgaggggtctcactgcagtcaccagacagcaggcgggcagcacacgggctggggatggccggcaggggtccgagatggctgaccctgggctgtgggacccgctccctgggaacctgggtcacgctcttctctgggcccagtggccctggctttaagagggggatattgggggtgtggtctcgaggtcccctccaggccctggatcaagggggaggggctgtcggggagggacagaagcccccttctccgagtggtcagctcagagcagccccagggccccttctccccacagggctcacctgcccacgctttatcccaaagtagcgcgccacagggtcccccgcctggatcctgggcagctggttctctcggagcttactgcgaagcaccgtcaggaaaatgccagacagggccgttgggggggcaggggtgtgtgtgggggggaacgcggaagtctcgagggacagggaggggcggggccggtggggctggaaaggatactatcgggccagcagctctgtcacctcctccttggtcatgacgacgtgctcagggactagctgccgagagaggaagccaccaggcatcaccaagggctggtgagaccccacgtggctcccaggtgccaccacagcccctgcgccttcagacggacaagagccctgaaccccaccccgatccccggcactcagggagcccacccaccccaccctggctccacaggcgggggacggagtcacagctcctggggcttctgaggcagacgggctgggcacagccacctcctgctgggactcctcctgtcccagcactagggtccctccacactcccagcagtcccgattctacaggctggggtgggcccgggatctgcattttttttttttttttttttttttgagatggagtcttgctctgtctcccaggctggagtgcagtggcacaatctcggctccccgagtagctgggactacaggcgctcgccaccacgcctggctaatttttttgtatttttagtagagacggggtttcaccgtgttagccaggatggtctggaactcctgacctcgtgatccgcccgcctcggcctcccaaagtgctgggattacatgtgtgagccaccgcgcccggccgggatctgcatttctaggaagctcccgggttcggctgctgcaggcccagggccaccctttgagaaccctgtcctccatgcactaataggaacacctgccctgggccccagatcccacatcttcctggccacccacaaacgctgcatctctgccggccccacgcaggcgggattccgcggcgcgcgcccacctcrtgctccgtgatgttgatgagcagctcctgctgcagaaactgctccaggatgtacttggsggccatgtcgaccagggactggaagagagcggctctaaggcacggcccggaggggcccagacaaccccaaccccatttcctgcctcaagctacctggggcttactcgtgtgccccaacaacacacccacgtcgtgaatcagaaaaccccaccgccagcccaggagccttcaacagcccgcccctccccagcctctctgctcatcgagagcctcatccagcagtgaagtggccgtggaaactcggatgtgtttccatccatcacacgcttccaggggcggccctcagagctggcagggcgacctcttccccatacaggggtgctgctctgtgtggctgcgtgaaccccacagctggtgggccagggactaaactgctctgctgactgcccgtcacagcacagcagcctggctccagagtgtccgacagacagacggggaacacggataggcccctggaggaccccgtgccgggcctcctctgcaagtccccctggacatcagctcaggataaagaacctccggctcctggaatctgcaccaggccgagggctggagcccacaggagctggcgagaggcacagtgccctccgccctgacgcccctcctgagagctgggggaggacggcggctgcctggggtggggcccatggacgcggtgggagggaggcggtcggggcttgccggacatcccggccacatcctccagggcaccctggctggcctggcccaaagcccaaggcacgtgggccgcctgtgggtactgcttgcgggaggaggctggggagggggagaggctggcggggtggggcaggggtgcccacctgcttggcggagggtgtcatgccctgctgcaccacgatgagagcccgtgtgatgttctcctcctgcatgcgctggcagtacaccttgatggtcttgatgcccaccttgggctcctctgcagacagagagtgtgctggcctgcacgagcctgggccctcgtggccctcgcccacccagagcccagagcacccaggttccagccccattccacacaggtgtctctcctgctcgggcctcggcttccgcgtttgcaaaacgaggcctgagttgcaggatcccaggacaggggaagagagggctgaaacctctcattcacccggagacagggacagggggctgacacccctcagtcacccagagaccagggagaagcagagaccttcgactctgagaggctcccaccctgggcagttctggggaggcgggtgactcagcaccaacctctccaacaagcagacctcacaccccaggacgctctctttaagaagcatcacctgaggccgggtgcggtggctcacacctgtaatcctagcactttgggaggctgaggcaggtggatcacttgaagtcaacagttctaaaccggcctggccaacatggtgaaacccggtctctattaacaatacaggatgggcgcggtggctcgcacctgtaatcccagcactttgggaggtcaaggtgggcagatcacgatgtcaggagatcgagaccaccctggctaacaaggtgaaatcccgtctctactaaaaatacaaaaaattagcccacgcccgcastcccagctactcgggaggctgaggcaggagaatggcgtgaacccgggaggcagagcttgcagtgggcagagattgcgccactgcactccagcctgggcaacagagcaagactctgtctcaaaaaaattaattaattaattaataaacaatacaaaaagaaaaagtagccaggtgagatggtgtatgcctgtaaacctagctttttgggaggctgaggtggaaggattgtttgaacctgggaggtggaggttgcagtgagctgagattgcrccactgcacactccagcctgggtgacagagggagactcagtctcaaaaaaaaaaaaaaaaaaaaagactgggcgcggtggctcacgcctgtaatcccagcactttgggaggccgaggcgggcggatcacctgagattaggagtttgaaagcagtctagccaacatggtgaaacctcatctctactaaaatgcaaagaaaaactagccaggcgtggtggtgggtgcctgtaatctcagctactcaagctgaggcaggagaatcgcttgaactcaggaggtggaggctgcagcaagccgagatgg

SEQ ID NO: 94966 - DNA, 23986 bp, Homo sapiens
ctccgtggggctcagccaggctccagcagggtcagacgtgctgttaagagcaaagccacagacgatgacttgtccattctcagtggatgctccaggctgtgcctacacagcagtgctggtgacatgtccagggttccagggcccggtggcctgggagctgctttctccccactggctgggctgcatctggccctggctggaggccttgctttgaggggctgtgaccctcttcccccaggccctccccagccgacgacagccaccggagaggagatcggaacacgattgtctcagatgcagggcgctgtgcgggacgaagccgcaaggactctcgtatcgggcccttgggactcgggaggtgccagaggcggcggctgctctggacctcggtgttcactgacctttgtttcacttgcctctgctcgactccgagagcaggaaacccggccgtggcctggcagctccgcctcccatgcccgcacgctggggtctgtcttgtctggagcagtggggcacaccccggaggaggcgggggtcagggctgtcggccttggccccctgctggtcgctgtttcggggactcggggcggccagtaccaccgcctgaggcggggctcagcagcgttgcatgtacgggcctcgtactgcctcatggaaaatcctccggagccgccctccattgtgggttcctgagagtaggacacattgccatggttttgtgggaatcacgcgcccctgatggaacttttctgctgttgtgaagtacttttatccatttgcttctctgctgaccttgccaagttgttcgaggtggaattaaacacctcccagacctctggcttgtcttttctgaacccccaaacacatcccactgcatgggttgtccaagcttggaaatgggagagtgaccctgccatccccagggacatggcctggccttggggtggattcccacctcactggcgggcctagggtgctgtttaaacagcagccagaggctgggcgcggtggctcacgcctgcaatcccagcactttgggaggccaaggcaggtggataacctgaggttagaagttcgagaccagcctggccaacatggtaaaacctcatctctgctaaaaaaaattagcgagcatggtggtgggcgcctgtagtcctagcacctggggaggctgaggcaggagaattgcttgaacccgggaggcagaggttgcagtgagccgagatcacgccactgcactccagcctggccacacagtgagactccgtctcaaaaaaataaacagcagccaggggcctcactggggttcatgcctgtggccccagctactggggaggcttagatgggaggaacacttgtttggaggtcaaggctgcggctccagtgagccgagatcacgccactgcactccagccggaatgacgatgagcacctgtgttgcagcatagccctgcccagcaggtggaaccagaatgtgccagaggcccccttgtgcgtcccaccccgcctgcaccctctgcccttactgtcctgtgggctctgagggtgtcaaggccgctgggacaggccctgcctgggtgcttccctcagtaatggggggtcgtgggtgctctgggttgtcagccgggcagttgagtgggagtcaggggtgctgacctcacaggcacggccagtgaggagcattccggggccctgaggatgccagcatgggtggtcctgggctcgccctctccacagcatggctggcgttcctcgactgccgccggagccccgggaagacaggcttgaccccgtgcacacacgcagggagacgccaggagccctgccctcagaagcctgcacgctttgcctctcttctggcagctagctaaccctgcatccccacctgagcctgtccctggcactgaggacactggacctgtgtcactggggtggggtgtcctgggtcctgctgggtgctgagtgtctccatgccaggagctcccgcctctaccatcgagatgaccacagatgtccccagacgtggcctggtgctccgtggaaaactgctgtccacaaaccatggygtccttcccctgacccccgccccttccctctctggcttggcccagcgggtgtctcagaacctgggtgcgtgcttctgccagccccccaaccacctggcccacactccccaacccccttcactgagccgcagagacccccatgtccctgccaatgctttttccgaagccggtctcacttgttcccgccctggcagtgtgaggggaattggggtcccccctcagtggcacagctgtgcctgtctgatgacttccaccaagcccccttcactgagctgcagagacccccatgtccctgccagtgctttttccgaagccagtctcacttgttcccagcagtgtgaggggaattgaggttccccctcagtggcacagctgtgcctgtcggatcacttccaacaaggtggccttggtggccgcacggggcacttcgtccatcttaaaggggcaacacaggcatgcagcgagaattccaaaccacagaaacctcactctcatgggccccactgcctgaggcattttctgttttgcttttgttggtgggttggttggttggttggttggtttgagacagggtctggctctgttgcccaggctggagtacagtggtgcaaacgtggctcactgcagccttgacctccctggctcaagcgatcctcccacttcagcctcccaagaagctgggaccacaggtgtgcaccaccatgcccggctaatttttgtgcttcttgtagaaatggtgcttgctgtgtttccgaggctaagtgatcctcatcggcctccaaagtgctgagattataggcgagagccactgcagctggcctgcctgagttcttgtgcctctctgcctccctccctgtgccagcctcacgccccctcctcaccttccccaattcctactctcaccccgccctgggtccttcccctctcactggcctgagctgtttctggaactgctgcctgccctctgctcatgtcctgcctctgccccgtgaaaccagctcctccatgttccctgtctcaggggtgtcctccagggcccggagttcctgaaccagattcttctccccacctacctcacctttctgtccagtccgcctatcagtcagccccctttgcagcagaatgccaccccaaaacccagcgcctggaacattctccacacagtttctgtggggccgggatctaagggcagcccggccaggggcttctagggtggctcgtggggctgcagtccacatgctggttggggccacatcatcagaaggctccaacggggctgggggtctgaggagcctcgctgggggcagcagcccaggagccacagcagccgcccatgaatatcaccgccattctgttggtcacacagagcagccccggttgaacgtgaagaccctataggggctgggcttggtggctcacacctgtaatcccagaactctgggaggccaaggtgggcagatcacctgaggtcagaagtttgagcccagcctggccaacatggtgaaaccccatctctactaaaaatacaaaaattagccgggtgtggtggtggatgcgtgtaatctcagctactcaggaggctgaagcaggacaattgcttaaacccaggaggcagaggttgcagtgagctgagattgtgccattgcactccagcctgggggacagagcgagactccgtctcaaaaaaagaaaaaagaccccataggaaggcaagagcctgaacagcaaacgcaagcccaggagccctgtcatcccagcggccagaggaccatcccccttggctcccactgaactcagctgcagtccccaccccatcccccaccaccactagggctaagagccagcagaaatccttgggctggcttcattgttcctcccgggaagagtccagggcagctgacacatgatcccagcatggcacgccggggacaggggaggcactctgctgtccctgactgtatttaaaaaaaaaaaatccacaagcaaaatccctaatgagcaatgttccacagtaagtcctgcctcagaactgtgcaggcatcagaaacaggaatgcctgagaaacggccacggtcccaggagctgaggaaacaccacgcctgatgccacgtagggtcctggatggagccctaggccaggaaagggcattagaggaaacccaggaaacttggatagagtgtagattttggtcagtaataatgtatcatgtgacaaatgtatcacactcatgaactgggcatggggtactcacaactctaaattattctaaaaatattgatataaatttaagaccaaaaccatggccaggcgtggtgcctcactcctgaatcccagcactctgggaggccgaggtgggcagatcacctgaggtcaggagttcgagaccagcctggccaacaaaccctgtctctattcaaaatacaaaaactagccgggcatcgtagtgtgtgcatgtaatcccagctactcaggaggctgaggcaggagaatcacttgatccagggaggtggaggctgcagtgagctgagatcttgccactgtactccagcctgggtgacagagcaagactccatctcaaaaaataaataaataaaaataaaaccaaaaccctacagcacgggcagctatgagaactagagaaggaagagggttttgtgcacctgccagcctcttaggttcttgtcagcttttcccccaagtctttattattattatgtattgtagagatggggtcttgctatgttgcccagactggtctcaagctcctggcttcaagtgatcctcctgcctcggcttcctaaagtgctgggattgcaggtgtgagccaccatgctgggcccctccaatccttttgagctgcccaagaacagagaccaggcctggctttgctcagcagtgggtccccagcccatggcacgaattcagtaaacacttgttgtggtcctcaaggggcccccagtcttgctagtcacctgtgttcacctaatttgagcctctgttttctttactttttctttttcttttttcttttttttttttttttgagatggagtctcactctgtcgcccaggctggagtgcggtggcacgatctcagctcattgcaacctccgcttcccggattcaagtgattctcttgcctcagcctcccgagtagctgggatttagatacagggtttcaccatattggccaggttggttttgaactcctgacctcaggtgatttgcctgcctcagcctcccaaagtgctgggattacaggcgtgaaccaccgcaccggcctttgcctctgtttttgtaatcataaaacaggcagacaaaacctccagtggaattgtgaaaattaaatgatatgcatgcagaaagcgttctgcaaactctgttttgctagtttgggtgtttagtgttagtttttatatcattagtactggttgtaaacttatcaatttaagcaagatggaaaatcgagggtgtgtcagggaagggggaagtttgagctgaaattatgacctcttaggggtgggaagaggaggctttggggttgtgaggtctgagcccccttactttgggatgagtccacatcgcggcgactcctctgcagaatgcggtgatgttgcggtaaggggtccgggatagctgcgaggcagctggaccaatcctgaacgaaagacatcagtgatcgcaagaggcgctaaaacttctgccgaaacccgggatcgaaccagggacctttagatcttcagtctaacgctctcccaactgagctatttcggctgggcggcagagtcgctctcgccgggactccgtcccgcgctgcgccttccctgcgcasgcgcagtcgtttcgcgtcagcaggccccacatcctttgtaaggtctcccagggcgccggagcgcagtgtcgtctctgtggcgcaatcggttagcgcgttcggctgttaaccgaaaggttggtggttcgagcccacccagggacgcgtggtgrcttttkccctcctggaataacaagaaaatgagtgtcgcctctgtttttgtcggtccgccgcagacccgcggcccccacgtgcgcactccgatgacctttccgcctcgggtgatctgggggtgcacggcgcaacacgaccacggaggccgaaagcgcagcggaacctcccggctccaggttccggtttccgcatgcgctccgagccgctttgggcggcggccccgggaacccggagcgctaaggagaacggacctcagaggttgtctgaaggccgaggccaagatggcggtgctgtcaggtgagcgcggcaccggcggcgggtgtggggccgcgcgggtctggggccgtgggagcctcgggtgtcgtggtggcgtcgggggtcggtgccggcgtcgtggccgcggtcctctccgggcttctccgagccggccgctcctcgggctccccgcccggcttgcgatgaacggtcgccgttattgcgtccagagtacagtcggggaaaccgaggcccggtaggtcatgacgcaagcctccagcctcaggaaggcgctcggggtggaggctggaggggccccattcacgtccccgagaccagggcacggcccgcgaggctgctcttgagatgccctggagagagcggggcctgcctgacaggctgggaaactgaggcccattgagggtcttcgaggtcacagggccgggcctgggaaggaacaggacccaggacatccacgccaccctgctggaccctccacctccctccccacccctgggaggtaagggcctctcgcagagcctgtcctgctccagggacttttttgggatcagctgaagcctgcggacctctgctcagataaagttattaaatgcatggaataaaatccatagaattgcaaggaaatcagttacacggagaggcagttattaaaagattgtcttgaaacctgattggcgacttagtaatctaagtgcttcccttatgaacgcgatctagcggcaggtctaattgcgactgtgatttggaaggagtgaggagtggaaatgagrctttgatgatacggaaacgtctgcagcccctgcaccatagctaggaaacatctgtgattccgcttggtgaaaagttacaggtcctgctaatactgccgtattttgttgtctatgctaagaattttttatttatttattaagacagggtctgcctctgtcgctcagactggagtgcagtggtgccatcttggctcatcactgcaacctgtgcctcccaggctcaagcgattctggcacttcagtgtcctgtgtagctgggaccacaggtgtgcgccaccatgcctggctagtttttgtatttttagtagagatgggggtcttgccctgttgcccaggctggtctcgaacttctgagttcaagcaatcctcccacctgagcctcccaaagtgctgggagccacggcacccagcctacgctaagaattgaatgaagggctaattttccataagatgctggtgacaacaaagacatatatwtttttttattccaagcaaattcacagttctgaatcctcaccaggccccttgttaagaatgcctggcccacgcgcggtggctcacgcctgtaatcccagcactttggaaggccaaggtgggcggatcacctgaggtccggagttcgagaccagcctggccaacatggagaaaccccgtctctactaaaaatacaaaatcagctgggtgtggtggcgcatgcctgtaatcgcagctactggggggctggggcaagagaatcgcttgaacccgggaggcggaggttgcagtgagctaagattgcaccattgcactccatcctgggcaacaagagtgaaactccgtctcaaaaacaaaaacaaaaacaaaccagctgggcgtggtggctcaggcctgtaatcccagcactttgggaggccgaggtgggcggatcccctgagttcgggagttcaagaccagcctgatcaacatggagaaaccctgtctctactaaaaaatgcaaaattagctgagcgtggtagcaggcgcctgtaatcccagctactcgggaggctgaggcaggagaatagcttgaacctgggaggtggaggttgcagtgagccaagattgtgccgttgcactccagcctgggtgacaagagcgaaactccgtctcaaaacaacaacaacaacaacaaaaaccctgacccagaggcacagaatcccatcacctcagaggttctcagaagagtatctcctctgctaggagctcatccaaagtcctgcattttcagcttgggaaactgacacctggagtggggcagctcccaccagagcctggggctgggcagttagcctgtctgctgtgcccagcctcaggcatgccaagaagtaggtcacaggcttgtgtccttcagagagttgtggcctggacggggccatgggaaacagcaaccccggatgaggctaaggctggggtgagggaggggctcagaggcaggagaaggccccatggatcgctgcattcaggggcatcaaaccctggccctggcccctggaggctgcccacagcctctccatcgggcctcacctcacccacagcgacaaagtaccatcacctgggcagcttcaacagaagctgattgttctcacagttctgggggctggaaggccaagattgggggtcagcagggttggttcctgctgaggcctctgtccttggcttgcccgtggccatcttctccctgcgtctttcctctgtacatgtttgtgtcctgatcgccttttcttacaaggacataagtcatatcggatgagggcccaccctcgtgacctcactgtcctttataatgaccctttattttattttttgagatggagtctccctctgtcacccaagctggagtgcagtggcgcagcctctgctcactgcaacctctacctcccgggttcaagtgattctcctgcctcagcctctcgagtagctgggattacaggtacctgctactacacccagctaatttttgtatttttagtagagacggggtttcaccatgttgcccaggctggtctsgaactcctgacctcaggtgatccacctgcctcggcctcctgaagtgctggaattacaggcatgagccaccacgcccaggcattaatgatccctttaaagaccccatctccaaaagcagtcacattctgaggtcctggggttagggcttcagatgcaggtcgggtggagggtcayagttcagccgtcaccagcaccaagcctgcctttctggattcttccttgtgagccaggattcctggcacctccaggtttcctcccgctgagtgccccgggcgtggcaaggccctgctctggccttagtcttcgcctcgggaaggctctcccaggagacttcgtgcaggcgcgttccctcctctgcgcttcctttgaggctggctcctctaggggtgcttttctgtgtagattgacgtgggcagcgccctccccgcttagcggactgcagattcctgcaggatggggcctgtgctcagctgcgtgggaaacgcccgagcagcagccagggcctggagcacccagcacacgcttgtcaggcacagctgaggccaggacgagcactgggtgcccagggaggccccagcattgcyggagtggcaggcaccccacaagcacgcatagatggagatagaaccgggtgccggcaaccggaggacctggggtcctggtgtaggcgggacgccccgggtatctgaactgaaacctgcctcatgagaaggggccagcagtgtgcaagtgtgaggcggggtgtcccccgcagggcagcagccagtgtgcaagtgtgaggcggggtgtcccccacagggcagcagccagtgcgggggccctggcgcaggaaagcggcaggtgccagtgaagatcgccagggcggggagacggggcagcgtttgggttccttccggggccatgcagtctcaagcaggggactaagactctctcgtgttctgaaaaccccctcgttacctaacgtttgttaagtggcactcgagttgggatcagagctaggctgtgcgggcaggagcctgatggggaagcgcctggaggccggccctgcgtgctgcccgcagctcactgttcccaccccgtggtcctctctgcagctcctggcctgcgcggcttccggatccttggtctgcggtgagtgcctgagtctccagccctcagctgggaggggccttcagcagcgacagacgaacggggcggggggggtggggggtggggggagcgccttgttgaaggtcacgtgtcatgttagggacaggatgcaggtgacggtctgcacgctgcccgtgatgtgccgggaccctccctgggacagtccacgcagtggcaaaggctggacagtcaggaggaaaaccctgtgggcccggctcagtgccgtcagagctcaccgccacctggggtgggaaggcattctctgagccctgtgcagatggcagctggggcaggcctcctgcagacccaggtgactgacagggcggtgagggcgcatgcccagggatcttaccttggtcatgtgtggagggcctgctgccagtttccttctgtggatgatcctgggaccgtccttgcttggacactgttgacctgctgggtacgtcacaaaagaarttccattcaagtctgggccatcattgggggtcggggcgatggccgcatggctccagcggctctggccagtggcccaagtgttgacaggcagaggtgagaacagtctcgcagcagggaggggagaggcaggacaacagtgagtgcggctgggggagctggaggggcctgggacagccactgacccgcgttccatctcccggcagctccagcgtgggccyggctgtgcaggcacgaggtgtccatcagagcgtggccaccgatggcccaagcaggtgaagctggccttctgggggaggtcgtaccccctcgccccacccccatcccttccttattttctgcatcagtgccgcagccactgaggtgcatggatggggcagggagggggtcacacatcccagtccctgacctcatgtgggtccaggcctctggcagcggccgtgggggctcgcatccgcctctgggaagcacctgcgtggctgacgcctcctgtgyccgtgtgtctctgtgccagcacccagcctgccctgccaaaggccagagccgtggctcccaaacccagcagccggggcgagtatgtggtggccaagctggatgacctcgtcaactgggcccgccgggtgagtactatgagctgtaggccctcctcgagcgccagggcctctctgcacactcacaggcacacacatacacacaccaacgtgcagacacgtacacacacaacacaygcatgcacactcacatgckcacatgtgcatgcaagctcacatgtatggacagatgtgtacacggaccacacgcacactcacgcacacaatgcacatatgcacactcgcacacatgcacacttgcacacacatgcacacacaagcacatgtgcacacaygcttgcacacatacacacatgcacacttgcactcatgcacactcatgcgcacatatacacatgcacacgcacactcgcacacaygtgcacatatatgcacagtcatgcacacacatgcacacacacrcatgcacacacgtccttgtgtggacacatgcatgtgtgcctgttggcatgcatgcacacaggcacactcactgatgcacacacacccctgcggccgtggagcagggcggaccctcccggaggcccctgtgctggcctggtggcctgtggttccatctgaggattcggaccctgctggagatgacacctccgtttccgtcattctctttctggcgtccgtgtgttcctcttgtttctcttttaaggtgaaagcagtgttttaagttaaaaggagcgcgtgtgaaggcagtagatccttctcggtacccgtttaaagcctcccctgcctgtggcgccagcccccacgcagcccctgccatccccctgcagcgtgagcacgtgcagctccctccagctcctgcggcacttgctgcgacagcccgggttcaacaatcccccattgatggacgttcactgtttccttttgttttttgtttcctaaacaatgccacggcgaacgtcctgccagggccgcagtggtcgagacaaggatagtttttaatgcaggatagttcttttctttttcttttcttttcttttttttttttttgagacggaggctcgctctgtcgcccaggctggagtgcagtggtgcgatctcggctcactgcatgctccgcttgccgggttctcctgcctcagcctcctaagtagctgggactacaggtgcccgccaccacgcccggctaattttttgtatttttatttttagtagagatggggtttcaccgtgttggccaggatggtctcgatctcctgacctcgtgatccgcccacctcggcctcccaaagtgctgggattacaggcgtgagccaccacgcccggctaatgcaggatagtttctaatggagggaacctgagacatggccagsggccgtcccaacacaggcttctggcgggcaggtggacctggccatttctgcccgggcagccctgcctcactctgtagcctgaccctgtcacccgccaacacatgcagcagggcccctgccaggtctcagagccgcgtgcagggagagcgggaacggtgggggaaatgagaagccacagggatggaggagaggggagggagtggccaaggagatctgagagggcttcctggaggcgtcgcacttggtatgtggacccagatctagttaacgcagagagttcccggttagacctgcgctactactcgcctgtagcccacgcgctcagagagtggctggagccccctgttgaaatggtgggacttaggatacactgggttcgaggaactatgtgatgaggacagatctcacccgtttctctctattttatgtatttgaatgtggctggtggggcgcgctttacaactcttggggcccggaggccacctgcaggagccgctgtgcctctcacctctgmcggctgccgccccgggacatgagtcgggggttctgggtgctccacgtggagtctcacgctgggccacgcggggctccggggrtggcgtctgacccgagcccggcctccgcagagttctctgtggcccatgaccttcggcctggcctgctgcgccgtggagatgatgcacatggcagcaccccgctacgacatggaccgctttggcgtggtcttccgcgccagcccgcgccagtccgacgtcatgatcrtggccggcacactcaccaacaagatggccccagcgcttcgcaaggtaggcctcktcccagccgcccagccgcccccagagtgagctgcgcacggaccccgcctctcttccaggtctacgaccagatgccggagccgcgctacgtggtctccatggggaggtgagtgcagggcggggggtctccagggacagacgtagcgtgagtgctggcctggccgtgccctgatggcrcttatcaaaagtgtcatctacattcagtgaaatcccacgtggtcccggcgctgcccttcagccgtctcggtgcctccaccctaggcagatgcgctggtgggcctctccccagaacgattcctcccrtccacccccacgcagcagaccccacattccgcccagttctctgctttactcacacataagtgatgacaggtgctgtagatagttttataatctcagccttctcacttgccattagttttttttctttttttttttttttttgagacagagtcttgctctgtcaacccaggctggagtgcggtggaaccatctcggctcactgcaacctccgcctcccaggttcaagcaattttcctgcctcagcctcccaagtagctgggattacaggcatgcaccaccacacccagctaatttttgtatttttagtagagacggggttttaccatgttggccaggctggtcttgaactccctcaggtgatccgcctgcctcggcctcccaaagtgctgggattataggcataagccaccacgcctggccttgccctcattttttagtcatttccccrtaacattgaaaggtatttagtctcttaacattttaaaatatttatttatttacttaaagatggagtctagctctgtcgcccaggctggagtgcagtggcacgatctcagcccactacaacctccgcctcccaggttcaagcgattctcctgcctcagcctcccgagtagctgggattacaggcacctgccaccacacctggccaatttttgtatttttagtaaagaagaggtttcaccatgttggctaggatggtctcgatctcctgatctcgtgatccacccacctcagcctcccaaagttctgggattacaggcatgagccaccatgcctggccaatatttattatttttattttttagagacagagtctcactgagttgcccaggctggagtgcagtggtgcagtcatagctcactgcagccttgacctcctgggctcaagcggtcccccaaccttagcctctcagagtgctgggattacagatgtactccactgtgcctactttttaaaatttctgtagagatcaggtcttgataagtttacccttttaaagcgagcagttcagtggtttttaggccaccacctctaattccagaacattctcatcacccccaaatgaaatgctgtccccatcagcagtcactctgcatccccttccgagccccggtgcccacacctcccctccctgtctctgtggatgggcccgtcctggacatttcacagaaacaggatcacacgccgcatggccttctgtgtccggcgtctctcactgagcgcgacgtcctcaaggtgcatccgtgctgtggcctgtgtccgagcctcgtgccttttcttggctgaataatatcccactgtgtggacatattactaatctaattctaaacagttaattagaatattccagagttttcataaccgtctcccactgctgggcattcagggtatgtccatttttacggctgtgggaagcagtgctgggagtggagtctgtgtggtctcctggggtttccagctccctgccccgggtggaccccagcgcctcactgacagagccggaatcaggcgagggtgaggctcagccgccccatagacaggggctgggtgttggcactgtggctgtctgaagtggctttttgttgacacatgtgatctgacacatcccagccccgggaatcggtggtcaggagccccctcgggaggggagcacttttccccgagttatcagccacgtgtgagcttgcgccccactggtcccacagaggctctgggagcctgtgcgtgtttgctcattgcttctccgtgacaagttccagcctcgtaggtgcctggcctgcagttgaaggcgggtggggatggggcgaggcctcgtggagggagggtgggcaggcgggtcttcggcacactcccctcacggtgcctccccaacagctgcgccaacggaggaggctactaccactattcctactcggtggtgaggggctgcgaccgcatcgtgcccgtggacatctacatcccaggtagggccgggaccgcaccgcccacgagggagctggagacagggccagcgccacacggagcccggcggcccctgtgagggagtcccacacccccagcagacggcgggctcccccatcctatggatgggccgactcggagcgctgcctcttagtggagcctgtcccctgtgagaagtcggcgatgtattcaggcatcagagggatcagagggagcaggggaagctgagtggaattcctgacacacgcctggtttacagcagtttcatatggtcctacctggcacaaaccaaagacctgcagttagaaataccaagcgagaaggttcctgggggccaaggacactgtcccgcgccctcagccttacagaagggcacgcaggactccctgggacccggggtggccggatttggcaaatgaaaacgtgggaggcttagtttgactgtgaggttagggtgaatttgaccatcaggaaaactgttagtagtaattgtttagtacgagtatatcccaacaatatttgggctatactgacactaaaaagagcattggctgcatacctgaaattcacatcgcaccgggaacattctttatatctggtgatcccgtgggactcttgcacctcacgtggtcccacgagggccatccccccgggcgttcaccttgacagtggtccacggtaggcaggcttggaggtggcgctcatgtgggacaggggacagagtcctgttcttggccaccctgtgctgcgtgcggcattagctcatgcgcagagagcccagccctgagtcccgagtctgggggtttgggcaagcgagaggcacatcctggtgcctctcaaaagtggaggaacaggctctgactttggattccgcttccctggaaagggcgttgatttgttcagcgttctgcacggttcaggtcaccccgggggcagtggagagggcagcctgggcctccctgtgacttgacagcacagagaggtccatcctggggtcaggagctctgcccatgcccctggcgtcttcccctgcagtgcagaccaatggggcaagttgcgagtgtggactgtactcctccctccttgcagactgagctcctccctccctggggaccgcgctcctccctccctgcggactgtgctccctgtctggggactgcgctcctccctccttggggaccgtgctcctccctccctccctgcggaccgcgctcctccctccctgsggaccgcgctcskccctccctgsrgaccgcgctcggccctccctggggaccgcgcccctccctcccagcggaccgcgctcctccctccctggggacctcgctcctccctccctccctgcggactgtgctgctccctccctgcggactgtgcttctccctcccttggagcagcctggacttgccagagctctgccaggtggggcctggccgccctttcccaggccctgcagtggccttgtcctttctcacctgtttccactcctgctgtccccgttgggccctgggcttcgtcctcttgctcaagccctttgttctgaacctgcgtggcagccgggactgggggatccccagcaaagagctctggcttggggctcagaaagagggtcatcgggtcctcgtgggatgcccgggctctgggccacctcccctccctccgcccagcctccctgcctccatctccgtccagggcagccccgggccctgctccccactgctaagtgtgtctgctgagcgctggcccccattgagtcctgagggctggggccgggggccgggttagtgaggtcagcgtcttgtccgagaggtccctgtgacagcccgggatgagccacgggtggagggcagtggggccttgcccaggggaggaccccactcttcctgcagggacctcccctgcgccggctcccagtccctggcactgcgcccacccagggctgtcagcctccaccttcagaggccggcccgggaaacccttccaaagccgagccggctgcgctgtgcacgcggtcacgcgggctccggctgcgggaagcgagactgaggcaaggtccctgcaggctgcccacctacggccgaggccctgctctacggcatcctgcagctgcagaggaagatcaagcgggagcggaggctgcagatctggtaccgcaggtagcgccgccgccgcmgccgccggagcctgtcgccgtcctgtccccagcctgcttgtgtcccgtgaggttgtcaataaacctgccctcgggctgccgcctcccagtgtggtgtgtgggtgaaaggagccggggacgtggggggatcacagaccccctgcggcgtgccgcccttgggctgggggcggttggagcagagccgggggcagagacgggcactgtgcctgccagcagggtcctttcccgctgctctgcgaagaccctggggtggacatcgtggcccaaagtcccgagcgtggaaggccgcacacccatccttcctgggagggccctgactcagtctccctctatgccctaaggcaggctgagcaaagcccgtctgagcctgccccggggttcagagtgtggcctgtggcctgcgtgtggacttgggcaggtcgccactgccctctggcccatttccaggcggtggcatgggctggttagctgagggctggggccagggagatggggaggtggcacctggtccaaaccaaagggctgcagggcaggactgtgagcctcacaggctgtctgaccccactttggggaccctctccacccagggctttcggggaaccctgactccaccccaccagccccttcatccgtcgaagtccaggcctcatcagggacgtgyattcattcagcaaacgtcccatcttcctgtgttcagcgccagatgccgccggtgctgggacctcgctctgcaggcccaccctgcatgcctgctgcacaccagggacagttctggggatcggcagttatgacgggccaggctgggatggggcccgggagactggggcgggggtggggaagaggcacccagcccagccgggtcaagcagcctggaagcaggacatgctggggtggggacagggcrtcagccagcggaacagcagccctgggccagagtgcagagcacaggagccggccttctctcagggcaaggaggtcagtggagggggcgagcaggacggccccaggaagatgggcgggctgcacacatgtggatgcagggggcaaagtgggaggcatggggtgaccagctgggcacaagggcacagacaggcaggacccrggatgttcctggggctgggcaggtggggctgcccctgcaatgggcccagcaggggcgatgcctcctgagaggaaaccacatctggaaatgggaggcttggggaacggggctgtcagcagccacgcccctcctggggcgggaggaggggagctcagggtgtgctggggcgggcagagaagtgggttcctgcctggggtgggcaaagatccttgtcccacccacaccccggccgtggtgctgccaccccctgagaccctgacctagttacccccttccctgaccccactgcaaagggtcaggtggctttcatctgaggaagggacatcgggcatcagctggagatgtctgctatgggcaagacagtgggrggggcggggcggatcctggggccgctcagaaacctggaggggagtcacccacttttcctgtgtccatgggatgggcgggaggtgagggagcagccgctggaagtaacagtcgcacgctcactgccgactggccaagcccagcgccggcgtttacttcacctcagggaccctgcagtgggcagcagtgaccctcacagagaagctgggaaagctgctggtgacacacagctgggatcagccctgggctggtgggacccctcacagagaagccgggaaagcttctggtgacacacagctgggatcagcccagggctggtgcgacaccctggactcccggccaggaaggcacggaggagggcatgggtgtggccgggccggggtgggggctcagcctttggtcaccaggggcgtgatcatctgtgggaaggcgtagtagcggcagtcggccggtgggaccagcgccatcacctccrtacggatgttctccctccggaagccggcctccagcagcgcgggcacctgcgtctcctggtcggggatggcaccaggtcacctctgagggccatgggggtcacgtgcaccctggcgcccacccctcattgaagagtgtttacagatggcaaggcccgggtgggcggctgcagctcccgtgggcacgtggcagggcagccctggaagcccaggtgtgaacgggaatctccagctccccagtgcgggcagcagcttcccggctgtcctggaaccccagccccacactcgagccacccccgggcacctactccacagttctccagaccttgccagtgtggcgggtggagccaaagaatcacaccagaaaaagaacacaggccactagttcccattttggaagaaaagctgccccaggggccacaggcacccagccggctctcacaacagcagcccagggcaaccacatagagcccttctcagataggccgcctccaccaggcagagggaacagcgagacaagcactgctgaaccagcaaagacagccaggtggaggcagctggagggaggggaacacgcagggcttaggctgaaccacagggcactggggagccatgggaggttgttgagctggtgagggactttgatttccattttttttgtttttgttttgttgagatggagtctcggtctgttgcccaggctggagtacaacggtgcaatctcggctcacagcaacctccgcctcccatgttcaagtgattctcatgcctcagcctcccgagtagctggaattacaggcgcccgccaccacgcctggctaacttttgtatttttagtagagatgggattctgccatgttggccaggctaggctcaaactcctgggctcaagtgatccacccgccttggccttccgaagtgccgggatcacaggtgtgagccaccacgcccagcctgatttccattttttttttaaattttctttctttctttctttctttcttttttcttgagacagggtctggctctgttacccaggctggagtgcagtggttcgatctgggctcactgcaacctctgcccctggggcccaagcaatcctcctacctcagcctcccaagtagctgggagtacaggcacacgccaccacgcccagctagttttttgtattttttttttttaggaaagatgaggtcttgctctgtagcccaggctggtcttgaactcctaggctcaagcaatctgcccacctcggccttccacagtgctgggattatagacctgagccactgctcctggcagccactgcgccaggcaaaggactttgatttctaaatgaaccagcacagtccagcccacccagggggtcaggaagggaccctccccaggtagcaaggtggctccagcagccccttcccacccccatccaaggtcacttcctggagacccatggggaacttcaggtgggcgcacctcaaacatgatggtgatgtctgagtacttggacttcatcagctccccccaggaggtgaggttgcagtaggtgaggacgccccccggcttcagcaggcgaaaggcgtggttctgtggaaggggagtggccagtggtcaggacggaggtgggggtgtgggcagaggggcttccccgagggcctcccgcatcccagcaagtcagagagaaccaccttgatgaagttgaactggtgtgtgtgccaggtctcctccgagagtgggtacgtgtcgtacaggatccctgcacggagaacagaagcccacgcggtcagggccgggctcagcgcctcacccagcctcacccggctcatcccccagcgggtggaggtgcagtgagacggggccgtgggtagaggtggggctcccacacaggcttgagaaccccgagatcgcctccagggcccctccgtgagcatgcccatccccggtgctccgccatcccacagccaggcccacacccacttgggctctgtccccccagtgcacatcagagggacccccacaagcaaaggaggggctgcattggagctggggaggcccaccctgtgatacgtcccctcacccctcaccatcaaagtgaccgtcaggcagggtgggtgccacatcctcccacaggcctttcaaggggatgaccttgcagaggggaaaagaaaaagagaggacagggtagagaggtccccaggatctccccacctgcagaaagggagcggccagggggactcccgagagagaagaccacctcctccacctctgacagccccaggccccccacccccaggaagcagtgccctcaccccaaggagtgggggtcctggagggcctgcgggcagaggggcaccttgtgtgtctgccgtggggcccagtcccggagccgctggaagacgccgtcattgcactcgatgatccaatgctcatcaatgggcgcctcctgcacctttgacgctgcgatggccatgccaaagcccacctccaggacccggccccctgggcagacacagggcgcctggcatcactaggtggggcgggcttaggaggctgcctggaggaggggcacagggcagggcagggctggggagactgcctggaggagggggcgcagggctgggctgggggtctgcctggaggggggcgtgcagagcagggctggagaggctgcctggaggagggggtgtggggcaatgctggggaggctgcctggaggagggggtgcggggcagggctggagaggctgccaggaggaggggatgcagggctggggaggctgtctggaagagggggtgcagagcagggctggggaggcttcctggaggagggggcacagggtagggcagggctgagctgggggtctgcttggaggagggggtgcagggctgaactaggctatgtgagtcacatttgccacaggacgggagggcaccctgggccagcatggacagaggcgggcggaacacagtagtcctgagcgggaacagcgtgggccctggccagcggccagagagaggatgaccagccagggaggccgaagacggccgcttttggggccaggcctgtggggaggcgagagccttggactttgagcccagcccacgctgtttgtcccgggtcccttatctctcgggttagttacttttctctccccctccctctatccgaaagttggatttgcaagagtggccaggcaagacctggacttgagactatctgggaggggaaggactggtccccagtgggccacacatgggccccccgctcaatcctgattggcactggacactggacgtgcccattttcagggtgggaacactgaggcccgacccctggacggggcctgtgtggggccagggagtcctttcttagcagcccttagcgtctgacgccaggcaggccagggccaccccggggacagctgtctccctgagctcagctttccgagtgctattcttagccgggcgagtcggggctgctctcccaggcaggcagaagggcagcctctccctggcacgaccccttcctcccgacctcagacagggagctggggacccggttccacccagtttcacccaggtctcacgtttgaggtccccatctggagagcggggggcctcactccccctggagaggaagtttctggtacttaggcggtgcctaacgtgtgcgggccccacgcctgccgcactccccgtgaacgcctccgtgtgcccccacctgcagccccacttcccaggcgaggagacagaggcgccccggcgggagggtgggctgcagagtccccgggtcggggcagccccggcctcagtttcccctgcgcccccgggggcggtgcaggccgggcgggggctacctttggaggaggcggcggcggccagcgcgtgcatatagggggtctcccagcgctccatcaccggcttgcccaggatgcgcaggtgcgtgtccgctgcgtcgtaggccgcgggcgccgccccccacgcggggctgcagttctcgccgggcgcgaagatgggggtcgcgctgggggcgctcatgctgcaggctggacggcgacccgacctcgatcgcgcgccgcccgggcccgctccctgcaggggcttgtgggccgggggcgggtccaacaggcccggggggcggaccc

SEQ ID NO: 94967 - DNA, 72891 bp, Homo sapiens
  misc_feature (1)...(72891): n = A,T,C or G
tgtgtatgcacatatcacatcctgcttagtgttttgtgttcagaccttagtgagttggaactgctcagtattctgtttatcagacttgctttgctctagtactagtatgaaaatgctgatttatttttgcatgctccacagtgcctggcaaatattgtggggggaaaaaaaaaacttgttagatgaggaagtgagcagaggtgacttctccttgtctgtgtacactaggacaaatcctgagaattccctggccttaatttctctgaccaaaacagtgacaatgataacaatggctgtcctaaaatcacaaaggctttttgggtgaaaaagaaaatacagatgagaggactttgggccctgaagaaggatggtagatgatttcgagagattattacaatgtgctgcacttaatatgtaaaaccgtaaagaaacctaagaaagcaggagagggagaagtgaggggagctcttattcggttgctctcaccagaaatgctgttctatcttatcctcataacaagcctaaaaagcaggcataatcttgctcctttgttttcagctgggaaacctgaaacatagcaagtgtaagcggcttttctgactgtctgatttcaaagcctaatctgtttctacagcaccgtattgacttgcaagggacaattctacttgcatttttctgtactatagatctgtccccatagaaaaactccccagggctcttctcagcaaaagccagaacaacccacgtgagctgattgagattcaaggatatctgggctgatttggaaagggcatcatcttcggatggctatgaagtaataaagaagttcaaaatatgtcagctgggagtggccagaggacaacagaccaacgaggccagcctcacccttctggttcccaaacctgacgggactgttcaatgttgcacagacttcagctggctcaatgcacgatcagtgccaactgcagaaacatttcagaagtaactaactaaagccaaattcataataagctgcagatgactcaagactcctggcatttcctccccagcctttattcctgggaagagatggtgtttattatgacctgggtactatatttttcataacctggggagtattttaaaagcagtgattaaggcacacaaacttttaagtcttttagcagcagatttcagaaactttaaagttgtatagggaggggacagaaaatgggttgctaaatggtgcttcaggttgaaatatggaagaaaaatactttccttatacagtgtaaatgctaaatcatactcttttaatataccaagggagcaggctccagaactttttgttgttttctccctatttatctgttaaaggctgatctttgtgagagaaaaacacaagttagctcaaaactggtaagtacacatgtggttgcctttgagaaatgcaaatcaaacaacctcttggacaagattcccgcccgccttgccaccttttcaagatgtaagttgtttaacaaggcatctttatttggcttcagaatcttactcaagttctgagctgtggtaaactctgatgacattggattatcctttactgataagatacatttgataacttttttgatctttagaaagcaaacagcagaatgccaagatttatgaataatatataatctcaatcatgcaaagaaatctgcatctatacatgaatatgcattaatggtaataaagaatttaaatgttaacagcagctaattatagaattacaagtaatttttattttcttccttatacttctctgtttgccaaattctttttaaaaaacagaaatttcaagctcattcttgttggagaaaagaaaaggagagaattacctatataagcagataaaaagttatttgaaaaatatcaagctacccctgcagcagtagacatcatccattataaattcagctatgaaacaagaaacttaagatgtgaaagaccagaaagattttagattttgagtaggaagattttgaggaagacaaggaacactgtaggtccttattattttcttaatcagatgatgtccagaagttatttgtgtgtttttgtttttgttttgttttgttttttgtttttggagatggagtcttgttctgtcacccaggctggagtacagtggcatggtctcgactcactgtaacctctgcctctcaggttcaagtgattctcgcgcctcagcctccctagcagctgagaccgcaggtgcgtaccaccatgtccagctagttttttttttttttttgggacggagtctcgctctatcgcccaggctggagtgcagtggcgcaatcttggctcactgcaacctccgcctcccgggttcacgccattctcctgcctcagcctcccgagtagctgggactataggcgcccgccaccaagcccagctaatttttttgtatttttagtagagatggggtttcaccgtgttagccaggatggtcttgatctcctgacctcgtgatccgcctgcctcggcctcccaaagtgctgggattacaggcgtgagccaccgtgcccagccagtttttgtatttttagtaaagatggggtttcaccatgttggccaggctggtctcaaagtcctgatctcaagtgagccacccgcctgggcctcccaaagtactgggattacaggcatgagccaccgtgcctggcctatccaggagttatttgtgtctgactctcttaattcacagaacaaagttttgttttgttttgtttgttgttgttgttgttgttttggtttggtttggtttggtttggattgggttttttgttttcttttttgagatggagtttcactcttgttgcccaggctggagtgcaatggtgtgatatcggctcactgcaacctctgcctctgggttcaagcgattctcctgccacagcctcccgagtagctgggattaaggcatgcgccaccacacccagataattttttatttttaatagagacggggtttctccatgttggtcaggctggtctcgaactcctgatctcaggtgacctgcccacctggcctctcaaagtgctgggattacaggtgtaagccaccacacctggcacaaaacaaagtatttacaggtaaccaggtgtatagaaagagtggtgccacgagccaggtcacagatacttctaaatgtgttgctcagtctctgagaagccaggtccatggctttgaaccttgcagatgggaaaatgtggactaaaatagaaagcatgtgttcttcctcaccctgattatctagtcctgcaggcttgttgggagcagtagaaaggacataagactcagccacaggcccgagttccaactgtagctctgacataaccagctgtgtgacactgggcaattcacgtaacttctgtgggcatctccacccttgtttgcagatgagatctgcccccagctctaagatgttttccctggctggataaaatgtcgtgcctggataacgtccaagattggagaccaccccgctttaatgtctaactgggccactccttccctggaatagccacttaatgtcctcaaacataccggagtttccccatcccttggtttcaggtatcctccctcaggaagatgttgcaaggactgactaatgcacattagtgtcccaataacgatgcctgctgcaggtgctgggacttccaagtctaacctaggctggcagtacgaccccactgtgatcttaaagccacctttctgtcccgtctctggggcttcccatcccaccctatgtgattacagcttaagtctcagatgatgtcaaatccttctgccaaagaccctgatgcattcacaagaatgggttgatagataaggctagtttacacaggagggggagtccacgtttaaggaagcaagaacaccgtctccaatgccccctcgaaggacactcttgagatcttcatctttcccagaaaccactgaaaacatcgcccacatggaaggatgctttaaagccttctccttcggtccagagaaaatgaattctccgagttttcctttggttttgtcttgtttttaaccttcacacgttaatttccagggtttccccctcctggttccagacagcaccgatcatgaactcatctctgatcgtcgtacggtgagttgtaaccgcccccccaccccccatccacagggcaattcggaaggtggagagggtgaggtgggagtttcctgggcaaccgggcgcacacccgcgcccacacggacaggaaaagcttcgctgtctacgcaggtgcgtcccgagcacctgcgcacctgttgcgcggctctccacaggtgggccctgtctcttgcactggcctggagacacctgggagtaggtgattcccctgagatccgcgcatgtctctgtgaggcgagagtgggtgggcaagcggggctgcggcggccgcagcgggagggcggggtggtcccgagctcagagccttttcccgactcccacccggctcagccgtccacgcgtcccggacgcggcagcgcagtcgtgcggcaggagaccccgtgggacgcgccgcagaagcccccagggccccggccctcgcgcgtaggggactggagaccctgcgcgtctcctccgcgccttcctgcccggcgcctgcacctgctccccggctctcgggcccctggctggagcgaggcgggaggcggacggcccgtatgcaaatatccggcggggccggggccgcctccagagcccgggataaaaggcggggcggggcgcggggcagcgaagccgctgcctcccgggagccggcagagcgctccggccccgcacccgccgcccgtcgcccgcagccccctaccgcgcggcccgcgccccgccggctcccggtaaggacgcaccgcggagcggggacccgaggcaggggcggggtggggacacaggcacggggtccggctgcgcaccagcctgcgctttcccattggaaacgtgggcagcgtgcacctccgcgcgcttccccgcggccgggctggtagcatctccgcaggtgctgcggcgggccagttcgtccccaggccatgggcagtcaaggcggaaaggagctgcgttgggtctgcgcggggttaggagagaacaaaatgccctcggattggagcgggaccgggagtccgaaaggaagaggttccaccaggggtctctggctcctcagagcttatcctactttcccccagccgtccggagacgccgcggggaggcaagcggaaagggggaacctggccgagggggaaaggtgcgggtgtggacacctgtgaaggagcagcacgaatcgaatcggccgtagaggctgcagacgcggccgcgaaaccaccggccacgccgggcaagggacccagcactgctgagcgggcacctcgcctagtggaaaaaagactttagtagttcccctcaccccctactacttttttttttcttatttaaaaaaatcctctgaagtctatttttaaagctaataccaatcacaaggttggccagtttgacctgcggtttgacctggtagcctgttgtgaaaatcccttcctcatcccacgccttcctccaccccatcctgcatcccagaagatgcagtgtggaaggaagacaaatattcccccagaaggtgtccgcctccagcttactgtcctcccgttttatgatgcctgataggggttgttcactgaggtggagagaaagaaaggaacctctccctcctcctctgctcctgaaaaccagccagaaccactgcagggaccaaggagctttggagtttcgggaacacctgagggctgcccaggtggagataagagctttgcttttgcaaatggatgtccttggagctcatcctagaaaggatgaattggagggtagggagtggtgaggcggggatatctgacacatctctccttctgtttctgtttgtgtatgtttgtcctggttctgggcagtcactgggtaagagaagactggaagcatgtcggagttttggttaatttctgcccctggcgataaggaaaatttgcaagctctggagaggatgaatactgtaacctccaagtccaacctgtcttataataccaaattcgctattcctgacttcaaggtaaaattcttggggaggagtgaaaaagggatggattggtcagggggagacaggagagggagacaggttgctacctcaggaagccaaggagaaagtatcaaggcaaagcaggggctctgaggacaagctgaggtttgaggatggacggggaggtgatgggctrggtgggatatcatgccatagtcccaaataaattgtgatacctatgtagatgcagccacaggaaggaatgaacagggggacaaggttgtgggtagcagtgtctaatgcttcaaaaagtgggaagcacgttaaatgcacactcaggttctcttgggtgttcctctggctcctcctggtttgtctgcaacatctcagaagacccaccatatagtttagatgtgcaggcttggggggcttcagccttgattgtactcttgacctgggggcaggggaggaaatctaggatccctttggtcctgagggaggggaagggagggaatttggtgacagaagagagtttgggtcatgcccaggcatctaagggttcttggagtggagggcaaagttcaaacgaaaccaacattaaggaagaatgaggccaggcgcggtggctcacgcctgtaatcccagcactttgggaggccgaggtgggtggatcatgaggtcaggagatcgagaccatcctggctaacacggtgaaaccccgtctctactaaaaaatacaaaaaaatagccaggcatggtggcgagcgcctgtagtcctagctactcgggaggctgaggcaggagaatggtgtgaatccgggaggtggagcttgcagtgagccgagattgcgccactgcactccagcctgggtgaacggcgagactctgtctcaaaaaaaaaaaaaaaaaaagaatgagacatgtgcaatttttttccccccgagtagctgggattacaggcgtgtgccaccatgcccggctaatttttgtattattagtagagatggggtttcaccatgttgggcaggctggtctcaaactcctgccctcaggtgatccacctgcctcggcctcccaaagtgctgggattacaggagtgagccaccacgcctggccacacaattattttacttcaaaaagagtggacttaccgtggtgctttctgaggctgtaggtttccacggggaagacactacagctttctcccagaccacatggcacaggtgctggtgagatggcactgactgcccagcatctgctcttgtagaaaactgccatatactcccttttcaaacctcactttgcccctccgcccaaacagctgccccatcagctaccagggttgtaatgctaccccatttgctaacgtttgttgagcaaagagctgacggctagatacttgaaatgcatcaccgggaagctgactctggggacaggctgggagaggctaagtgttgtcaggctggtaagtggcagcagtgggttctgaaaccacatcttgctgcctttttaagcctgcctctgcttgtccagcaatggacactgtacgggtgagtaaattctgcatccactcattgatactgtgtgtgaggcactgtgctggactctggaaggtaaaaagataaaaaaagaagacacagcccctgcagaagttgcttaaaattaagttacttgagaagaagcgacttgtcttggtagagatattcaggcttcatcatttcctaattacttttttttttttttttggttggagcctcgctctgtcacccaggctggaatgccgtggtgcaatctaggctcactgcaacctccgcctcctgggttcaagtgattctcctgcctcagcctccccagtagctgggattacaggcacatgccaccatgcctggctagtttttgtatttttagtagagacggggtgtcaccaggttgaccagtttggtctcaaaccttcggcctcccaaagtgttgagattacaggtgtgagccactgtgcccagnnnnnnnnnnnnnnnnnnnnnnnnnnnnnnnnnnnnnnnnnnnnnnnnnnnnnnnnnnnnnnnnnnnnnnnnnnnnnnnnnnnnnnnnnnnnnnnnnnnnnnnnnnnnnnnnnnnnnnnnnnnnnnnnnnnnnnnnnnnnnnnnnnnnnnnnnnnnnnnnnnnnnnnnnnnnnnnnnnnnnnnnnnnnnnnnnnnnnnnnnnnnnnnnnnnnnnnnnnnnnnnnnnnnnnnnnnnnnnnnnnnnnnnnnnnnnnnnnnnnnnnnnnnnnnnnnnnnnnnnnnnnnnnnnnnnnnnnnnnnnnnnnnnnnnnnnnnnnnnnnnnnnnnnnnnnnnnnnnnnnnnnnnnnnnnnnnnnnnnnnnnnnnnnnnnnnnnnnnnnnnnnnnnnnnnnnnnnnnnnnnnnnnnnnnnnnnnnnnnnnnnnnnnnnnnnnnnnnnnnnnnnnnnnnnnnnnnnnnnnnnnnnnnnnnnnnnnnnnnnnnnnnnnnnnnnnnnnnnnnnnnnnnnnnnnnnnnnnnnnnnnnnnnnnnnnnnnnnnnnnnnnnnnnnnnnnnnnnnnnnnnnnnnnnnnnnnnnnnnnnnnnnnnnnnnnnnnnnnnnnnnnnnnnnnnnnnnnnnnnnnnnnnnnnnnnnnnnnnnnnnnnnnnnnnaatcccagccctttgggaggtcgaagtgggaagatcacttgaggtcaggagtttgagaccagcatggacaacatgaccaaacccccatctctactaaaaatataaaaaaataagccaggcgtggggcacatgcctgtaataccagctatttgggaggctgaggcaggcagatcacctgaagtcgggagttcgagaccagcctgaccaacatggagaaaccctgtctctactaaaaataaaaaattagccgtgcatgatggtgcatacctgtaatcccagctacctaggaaggctgaggcargagaatcacttgaatccaggaggcggaggttgaggtgagccgagatcgtgccatttcactccagcctgggcaacaagagcgaaactccatctcaaaaacaacaacaaaaaacacaactgatgggactgtcttggagcagaaaagcttttaggaatgagaacttctttaacttgctttctggtgtatctcttcctcagctatggggattaacaacatgactgactagcaggctgccattctaagaggaaaatgagctgaggtcagatggtaacatcatagtcactccttcctatggcaggcatatgacagtttatcctgttggtcaaaaataagtaaataaagacacccccaaatccactggtttccattaagagttttttctactttccactttggccattgaccaagggtgacaaattcaagatgaagtgacagagtccctgccgtgttgttgagatggcatcatgcttggccagaaacctgtgagcctctgacgtttttatgatctgtctaggtggggaccttggattccctggttggcctctctgatgagttggggaaactcgacacctttgctgaaaggtaaaatattccttatttactacatacaagtgagaatttgacattgttgtcagaggacacagtgttcttgctttggctgaaccggagtatggacttgtctagacctggttccaaaagtgagcagagaaaaccgatcagtccccctgcgggtgctgggtctgcaggagcccgcctgatccctcctggtgttttgtctgctggaggcagcacttgttaaggggttgccttcaacctgaagatcatgcataggtgccgagacacttggaaaagtccttggtgtagtttcccaccaagcctttttaagtttgtttattttttagtaataaatgctcatagcacaaaatttcaactacaaaaagaggcccggggcagtggctcacacctgtaaccctagctactccacaggttaagtcaggagactcgcttgagcccaggagttcaacaccagcctggacaatatagagagccttccttccttcctccctccctccctccctcccttcctcccttttttgagacagagtctcactctgttgcccaggctggagtacaatggtctgatcgtggctcrttgcaacctccgcctcccaggttcaagtgattctcctgcctcagcatcctgagtagctgggactacagacaccctccaccatgcccagctaacttttgtatttttagcagagacagggtttcaccatgtgttccaggctagtttcgaagtcctgacctcaggtgatccacctgcctcgacctcccaaagtgttgggattacaggccatgagccaccatgcccagccaaaagaccttgtttytaagaaaaaaaaaaaaaaaaaatagctagatgtggtgatgtgtgcctgtagtcctagctactggggaggctgaggtgagaaaaatgcttgaacccaggagcttgaggctgcagtgagctatggttgtgccactgcactccagcctagacaacagagtgagaccccatctcaaacaaacaaacaaaaacccaaagtacaaaaaggatatatatagtgaaagtgaaggtttccggccaggagtggtagctcacscctataatcccagcattttgggaggccgaggcaggtggatcacttgagatcaggagtttgagaccagcctggccaasacggtgaaacttcgtctctactaaaaatacaaaaattagctgggtgtggtggcgggtgcctataatcctagctactccggaggctgaggcaggagaatcgcttgagcgggggaggggggatgggggttgcagtgagccgagatcgcgccagttcactccagcctgggtgacagagcaagactccgtctcaaaaagaaaattaagttttcttctcacctgtttttctctttcctgtcccctagtcctccattgcccctcttttaaggcaattttcctataactttctaggtaagccttccagagatagccaatacatgcacaaataaatatgtcttaaaattaatattattcattcatgtatttgtttacttatttgtgttttttgcagacagggtctggctctgttgcctaggctggagtgcagtggtgcaatcatagctcagtgcagccttgaactcctgggctcaagcgatcctcctacctcagcctcccaattatctgagactatggtcacatgccatcatgcccagctaatttttgtatttttttggtaaagacaaggtctcactgtgtttcccaggctggccttgaactcctggcctcaagtgatcctcttgcctcggcctgccaaagtgttgggattacagatgtgactcaccacattcagccttaaaattaattttgtacaaatgatagcatatattctgcatcttgcattttagttaaataacgtatcttagaggtagtttcatatcagtccataacttcatgttcgttcttttaatggctgtgttactgtgaatagatgtaccctcatttatttgaatagactggtggattgcttgactccaggagttcgagaccagcctagacaacatagcaaaacctcatctctattaaaaatacaaaacattagctgggtatggtggtatgtgcctgtagtgccagctatgcaggaggctgaggtggaagaatcacctgagcctggaagtttgaagctgcannnnnnnnnnnnnnnnnnnnccaagatcatgccacggcactccggcctgggcgaaagagtgacaccctgtctcaaaaaaaaaaaaaaaaaaaagtgtatgaggatgtcgtggagtcttaaaattatatatctttgtttaaattattacaaatctgggccaggcgtggtggctcacacctataatctcaggacttcgggaggccgaggcaggtggatcacgaggtgaagagcttgagaccatcctggccaacatgaaaatacaaaaaaaaaaaaaaaaaaaatagttgggtgcggtggctggcgcctgtaatcccagcctactcgggaggctgaggcacaagaattgcttgaacctggcaggcggaggttgtagtgagccaagatcgtgccactgcactcctgcctgggacagagcaagactttgtctcaaaaaaaaaaaatattacaaatctggtgtataatcattggaaaacttttttttttgagatagagtctcactctgtcacccaggctggagtagagtagcacgatctgggctcactacagcctctgcctcccaagttgaagcaatctcctgcctcaacctcccgagtagctgggattacagatacatgccaacatgcctagctaatttttgtatttttagtagagacggtgtttcaccatgtcggccaggctggtctcgaactcctgacctcaagtgattcattggaaagcatttatagatcatagaatagcatgaaaaaaatacaaatcacccataattaagccatccaaatataactattattatattgtgtttacagtgtgtacatctaattttctcaacatataaatataatttctggataacgtagtaatagaagtaagatcaggctgggtgccgtggttcacgcttgtaatcccagcactttgggaggccaaggcaggagggacagttgagcccaatagtttgagaagagcctgggcaacatagtgagaccctctctctacaaaaagtaaaaaatactagctggctgtggtggtgcacctgtagtcccagctacttgggaggctgaggtgaaaggattgcttgagcccaggaggtcgaggctgagctgagctgtgatcgtgccactgccctccagcctggatgacagattgagaccctggctgtggggtagatgagggcagcattccccaggggctgggtggtggcctgctgggctgcagtgctgggactcagtgctctgactgcttccttaaagggtttcagggattccttttctttttcttctcctaccccttaacatttgtgaaactttcaggtttttagggcccatggacttgctcttttcttcttagtggaatggtgatatggctgctactgccttgtttgatgaactgtatggaattaggagttctagtgaacatactttgagtatttctttttttaagacagaatcttgctctgttgccccagctggagtacagtggcacaatcttagctcactgcaacctctgattcctgggctcaagtgattctcctgcctcagtcttccaagtagctgagattacaggcgtgtgccaccaggccaggctaatttttgtatttttagtagagatggggtttcaccatgttgggcaggctggtctcgaactcctaacctcaagtgatcttccagcttcagcctcccaaagtgttgggattacaggtgtgagccactgtgcctggccactttgaggatttctaatctgcagattagtgctatgggctaaaaattgggttctctgtgttctgttgctatttaccttctgattgcctaagaatagtaggatgcctttgttagtgacattttgctttgtatgggatgttggactaacacacaggcactcctagtcaccaagtagtttgctgttcacagtgggttttttttttttttttgaaatgagataatacacaggtgtaaacctttttttttttttttgagatggagtttcactcatgttgcccaggctggagtgcaatggcacaatctcagctcactgcaacctccgcctcctgggttaaagcgattctcctgcctcagcctcccgagtagctgggattacaggcatgcgccaccatgcctggctaattctgtgttttttagtagagacgggatttctccacattggtcaggctggtctcaaactcccgatctcaggtgatccacccaccttggcctcccaaagtgctgggattacaggcatgagccactgcgccctgccaacaattttttttttcatgagacagggtcttgctctgtcgccagcctggagtgcagtagcaccatcagggctcactgcaacctccacctctctggctcaagtgatcctcccgcctcagcctctcaagtagctgggaccacaggtgcacaccatgcccagctaattttaaaattttttgtagagacaaggtcttactatatctcccaggctggtctcgaactcctgggctctagcaatcctcccaccttggcctcccaaagtgctggaattacaagcatgagtcaccacacctagccaccattcatagtctttgagaaagaaaactaatctttggctctctcattcataaaatctgtctgctctcagacgaatgaagggaagtaaaatcatgctaaatcaagtattatcaaatctcagggcctgtcctgtaaaagttaatatccaagaaaaagtgacttgatccggaaatgttgactcccttcttaggcttctctgcaccacagggargtatgactggccttgtacaacttatggcctagctgagaagacacatattaataaaataatcacatcacataatcaaataatgctaaacctaagaaaggcctgtaacagatgccattgagaacagcccactgccctaggctagtgaatgccttaggttttcctgggcagcagtgacaaaccgcagaaggagactggtctcgtgcaggaaggttggcttaagaaatgtgaactgggccaagcgcagtagctcatgcctgtaatcccagcactttgggaggctgagatgggtggaatgcttgagcccaggagttcaagaccatcctgggtgacatggtgaaaccccatctctacaaaaaatacaaaatttagccaggtgtggtggtgcatgcctgtagtcccagcacttgggaagttgaggagggagaattgcttgagcccaggaggtcgaggctgcagtgagcagagatcacaccactgcactccagcctgggcaacagagtgagaccctgtctcaggaagaaaagaataaaagaaaaaaaaaaagtgtgaatagttccctacctgctgcagaaatggtagcaattctagagctgtctttgctaccaattttctgtcctagtgcaagtcttttaacctcttattcactaaaacccctttagctctgaaattctgtgatcctggattgttattgtttccattttagtttctttcttgctttcttgctcttcttgctttctttcgctttcccttcttccctccatccctccctctccctctctctctctctttctctcactctttctctctttctttctttttgacagagtcttgctctactgcccaggctgaagcgcagtggcgtgatcttggctcactgcaacctccgcctcccgggttcaagtgattctcctgcctcagccttccaaatagctggattacaggcacccaccaccaagcccagctannnnnnnnnnnnnnnnnnnnnnnnnnnnnnnnnnnnnnnnnnnnnnnnnnnnnnnnnnnnnnnnnnnnnnnnnnnnnnnnnnnnnnnnnnnnnnnnnnnnnnnnnnnnnnnnnnnnnnnnnnnnnnnnnnnnnnnnnnnnnnnnnnnnnnnnnnnnnnnnnnnnnnnnnnnnnnnnnnnnnnnnnnnnnnnnnnnnnnnnnnnnnnnnnnnnnnnnnnnnnnnnnnnnnnnnnnnnnnnnnnnnnnnnnnnnnnnnnnnnnnnnnnnnnnnnnnnnnnnnnnnnnnnnnnnnnnnnnctcacgcctgtaatcccagcactttgggaggccgaggcgggtggatcatgaggtcaagagatcgagaccatcctggtcaacacggtgaaaccccatctctactaaaaatacaaaaattagccgggcctggtggcaggcgcctgtagtcccagctacttgggaggctgaggcaggagaattgcttgaaaccaggaggtggaggttgcagtgagccgagattgtgccgctgcattccagcctgacgacagagcaagactgtctcaaaaaaaaaaaaagaaaaagaaatgaaaatgcgtgaacaggcaagactgtggctataattgtgaaacagatagaacctgtgcaaatttaagtgttttctaaacaataaggactaggtgtggcaagaatgaaaaatcactgtgcattgttttcgttttccttgtgggtatatattcttaagagccttcctatcagggggaaggaaaatggtgtggtctgagcacgtcaaaattctaatcttagcttttttctagtccaggggtcagggtgtcctgtgttgggagttggtagaggttggggtaaaagagtgggttatatgtactaataaatctggagaatggcatcagttctttgaaaagtcctcgagtgttattaggtaaataaatgctagctgggtctgtaacctcggtagcataaacctgtcagcactgcttctgcccaggagaacagagaaggcacaagcgttttcagggtgtattgtttcaatatccttttattatttatttacttagggcactagagtgtttttccatgtagttggaaggcagcttttgcttacgagagctttctctctctttttttaatttattccttcatactgcctttgttaatttattctgtatttgccctatcattcatgaacatttgaaaaaccaaatgctattatcttaaaaaaaaaaaacctctctccctgttttaaaaaaaaagtttgagtccttcacagtatcttagcctgttttgcggtgttgattgacagagtgcatttcccaggcgctggggcggtcagcgggacctcagcaggaccttctgggtgctgtggtgcttggtgaccgttgcttgcccctaagtgcttcccctgtcgttgcttgcccctgagtgcttcccctgtctatggaatagctgctggcttcttctttacccacatggttccatggagctgactgagggttggctgatcaaagatttcatagctgagtgtggatgtctgcttagtgatacgtgtgagtcagttcttgtaagggcattctaaagagaagtaaactggaattgtaaaaagcatataggcttttcttctctgttggtggaagaatgtcagattgagatgacctatgtggcatttcatgggattcagtgaatagaccgcggttgcatgtctctgtatgccgcatgcatggtgggttgctctaagctgctggcagccctactgtgtgtgtctgctgggctcccactttccatggcggctgttccaagcctcttcacccctcctcctcccatctgcccctgctgagccctcttcctccttcccagctcctggagactcttttccccacctcttcccacaccctctaccatcacactcacagatttaccctctctaacacacccggtgctcccctctttcatggcacttgccacagtrgattttgacgtcttcttgtgggattatttggtcatatttttcttccctgtcttttgcttatgattagatccctagcacctgtaacatggcggcccttggtgactgattgaatggatgaatagagggaagcatcctgggttataagagctgggcagcccrttagagatcttatctaacctgcaagagttccaaatgaggaaacaggcccagagagaagatcctagaaagacaaaggcagacaggggtggcagaggagggaatacactccagatccatcaacttgccattaatggtctgcctgtctgggtccatctgccctgggggactctgtgccctgggctttccacgatgcttccagctcggagtcatcggtagaactgaccagaaaatggcctttttctcttccattccaccctcctccccgattgtactatcaatcattgttacttatgaaaacacttaatagtatttataaatctagacatttaaaatggcttactgagcctgggtaaaatagcaagacctcctctctacgaataatacaaaaaattagccaggcatggtggggtgtgactgtatgccccactactcaggaggctgtggtgggaggataccctgagcccgagtggttgaggctgcagtgagccgtgatcgagccattgcactccagccttggcaacagagtgagaccctgtttgaaaaaaagaaaaamatatatattttgacataaataaaatatcttgttaaagttaatttaacctgtttttacttttttaaatgtggtgactagaccttttttttgagatggagtcttggtctgtcacccaggctggagtgcagtagcatgatcttggctgactgctacctccccctcctgggttcaaacaaatctcctgcctcagcctcccaagtagctgggattacaggcgtgtgccaccaggcccagctaatttttgtgtttttagtggagatgaggtttcaccatgttggccaggctggtcttgaactcctgacctcatgtgatctgcccaccccrtcggcctccccaagtgctgggattacaggtgtgaactgccacgcccagccttagacattttttaattacccacgtggcttgaattatatttctatgcacagctttgggctggagctctagagaattattatcaaatttggacatgtgaacaaatctcctggtcttttttttttttttctctctttttttgagaaaggatcttgctctgtcacccatgctagtgttagtcatgatcacagctcactgcagccttgaactcctgggctcaagccatcctcctgcctcagcctcctacaggagtgtgccactatgcctggctaattttttttttttcatttctcttttgtagagatgggggtctctttatgttgcccaggctggtctcaaactcctgggctcaaatgataccsctgaccatggcctcccaaagtactaggattataggcatgagccactgtgccaggccctcctggagaccttgacaaaatgcagattctgactcagtggatctgggctggagccaggattctgcatttcttgcaagctccccagtgatgctggtgttgctggcctgaagaccacatttggcatactaaggctgaacacgttaactcacggctctcaaacttgagtatgcatcagaatcatcctgaaggtttgttaaaaatacatcactggtctccacccygagaatctgtgattcaggaggtctgagttggggcctgagaacctgcatttctacgagttcccaggtgatactgatgctgcgggccctgccactgtgctttgaggatagctgctttgaatggtaatgaggtgatctgtttctagaaggttttaaatatgtcattatgacatgtttggacctggtacrtttttagtagttctttaataatattcacaaaatttttcagtactgttgctctgttagttttctctttggaggaggagtagattcgcaaattgcattttgctagaaaatcattagtttcatgaactctttcaagttatttgaatagagtctacctatatattgtatctatgcatcccccattttttagtatttgcattttctttgattaggctacccagtggtttacctagtttgcttttaagagaaacaactttttaatacattgatcaattttatagtttttctgatttctaatagtttaacttctgcatttatcatcttttccttcctcttcatttgggtttattttcttgctcttttctgtaaaacatgcttagttacatgcttagttcatttttttttgtttagttctgtaatgctaacagcaatgaagttttctctgagtgttatataatttaaattttgatatgtggtattttcattatttttttcctagatattgtgcttttttttttttttttttctgacaagctcgaactcctgggctcaagccatcctcctgcctcagactcttgagtagctgggattacaggtgaacaccaccatgcacaactaatagtttatattttttatagggacgagggtttcactatgttgcctagactagtcttgaactactaggctcaaggagtcctcccaccttggcctcccaaagtgctgggtttataggcatgaaccgctgtcctcagtcaattctgcaatttttaaattcttttatttttgtttttgtttttcatttctaattctgttgctttgttagaaaatgaattaagttggccaggtgtggtggctcatgcctgtaattccagcactttgggaggctgaggtgggaggatcacttgaggccaggagttcgagaccagcctggccaacatggcaaaaccccatctttactaaaaatccaaaaaaaaaaaaaaaaaagattaaccaggtgtggtggtgggtgcttataatcccagctactagggaggctgaggctggagcatggcttgaacccgggaggtgcagtgagcggagatcacgccactgtactccagcctgggcgagtgagactctgtctcaaaaaaaaaaaaaaaggaaaaagaaagaaaatgaattaggtgctattctgacctttgggaatttgaaattttctttgtgacctaatatattgcctatttttctaagtgtttcatgggtgtctgaaatgggtgtgttctcttgttttcattgcgtagcattgataaacgtctattggagcaacactatcaatgaatgtcatatttgctatttcatgtttttatactttaggcgctttgctgcccttacgggatacagaaaggtctgtgacagtttgtttgtttgtttttggagacacagtctcactctgtcgcccaggctggagtgaagtggcgcaatctctctcggctcactgcaacctttgccttccgggttcaagcgattctcctgcctcagcctcctgagtagctgggactacaggcacccaccaccaggcccagctattttttatatttttagtacagatggggttttgccacattggccaggttggtctcgaactcctgacctcaagtgatcctgccttggcctcccaaaatgccgaaattacaggtgtgagccccggcgcctggccatctatgacagttacaactcctcgaaggctgcccctttgttcctctctagcgcttctgtgtgcagtatattgtcttgaattccgtgctgcctgatggtttgtcacatctctattttggtaactgccatggatggataaatgagaatattgttgtttgaagagttaagacatttgtgttagatcatgtagctgcctagtgtcaggccttcacctggtcatcctgactgcctggtctgtccttgctctgtggtaggcccctcacaggtggcagtagctctcctttgcctcccctgccttgattttcagtttaggcccagctgggatggtctccagtatctgccaggcttcccccagctcccagcagctcttatcaaaccagaagtccagccagcagkggaggaaggaatgttggctggccactttaggtacaacatgcgggagtaagggtcagctcgaggcaatgttgtgaaatcccgaaatcattctttggaggttaaatttaatgtaaggcatttccatcttggaccctgccccggtccttcagggacccacggctccattgttccccaggtctcagcaaggcctttttcacttaacaccgtgttggtgctcatcgcagccccagtaaatggcagccatttggacgttccwtattttcacgagcttcaggggcaacctcccatggtcctttttggatgttctttttgcattagcttcatgtccaaagttggtatcattctcaacagcttccatttgtgcagccttctgcctagggttcgttcccatctcagtcaaaggctccagtgacttaagcgcctggtgctcaagcagacagtctgggcaccagctccctgtccagccctccacaggagacgccagtaaggacggagtcctgtgggctccacctccaaaatctgtcccgtatccacccacttctcagcacgtccatcgaagccaccttcattgcgttcctgtgtttttgcaacagactcagttgtctcccgtttccctttcattcatttgccccacagcagccagagtgatctttttaaaagcaccctatcacagatcacctggggtcggaagttggagaccagcctgaccaacatggagaaaccccatctctactaaaaayagaaaaaattagctgggcattgtggcgcatgcctgcaatcccagctactcgggaggctgaggcaggagaatcgcttgaacccgggagacggaggttgcggtgagccgagatctcgccatggcactccagcctgggcaataagagcaaaactccgtctcaaaaataaataaataaataaataaaagcaccgtatcacatggctctcctgcatgaaaccctccatggcttttctgtgccctcgatgtaaaattcttacttgcaaccctcacttccagacccctagcttcctgactagctagacttcctgacccctagctagacttcctgactagctggtcaggccccagggtactcctctccagccaccctggctccatcctgccttggtcctatgcctggaagaccccccacccaccaccccagcctagcagggcaggctgcttcttatcgacccgatcccagaagactgctcacccagaagacttctccagactaccagccagcccggtccctctaggtgaccccgttttaattatctgcattccacagcccactattaaagcccactgtataagttatctttgcctttttgggggtattaattttgtaattaatatccttgcataactcattgtgtaaatttttgattattttaaagttgcatggagatgtttaaataaaactttaccaatggtcgggcacagtggctcatgcctgtaatcccagcagtttaggaggccgaggcgggcggatcacttgaggttaggagttcaagaccagcctggccaacatggtgaaacctcgtctctactaaaaatacaaaaaaattcgctgggcttggtggtgggcacctgtaatccaagctacttgggaggctgaggcaggagaatcacttaaacccaggaggcagaggttgcagtgagctgagatcatgcctctgcactccagcctgagtgacagagtgagactccatctcaaaaaaaaaaaaaaaagaaaagaaagttgcatgcccagaagtggaattactggtaaaatggatatagacatattgaaagctgtttgtatatactactaacttgttttccaatgaagttagaagaagttaaaagaaccaagtgcttttaagaagcttggttcgtgtacctggcaggatgatgtgtgattgttttaatgtgcatttcttggatttccagtgagagtaaacatattttcaagagcttatcagccattgtactcctatttgtgtgactgcgctgttcctggccttgctcctgcatcccctgggctgggctgcaggttgcacaactccaggggaagcccttcactttgtatgtgctggaactctgctccgagagcatgaaggacctgcaattgttctcagtggctaagctgcttggtggattgactttttggcatagtctccagaacttcaatgtgtgatgtttctttctatcccaaatgcttgggggattgcccagtgattcctaaaagactgtaggccccaggggatttcagcaacacttctctgggagctgagttcaggtcctccttacctgttccttccaaggggaaaactttctttttcattttttgagaccaaatctcactcttgtcgcccaggctggagtgcagtggcgctgtgtcagctcactgcaacctctgcctcccaggttcaagtgattctgctgcctcagcctcccaagtagctgggattatagatgtgtgccaccaggcccggctaatttttgcatttttagtagagacggggtttcaccatgttggccaggctggtctcaaactcccgacctcaggtgatccgcccgccttggcctcccaaagtgctgggattacaggcgtgagccaccacacccagctgaaattggctttttgaagagggtagagcattactgtctggaccgcatgtggstgactctataatgccagcttggccaatgagaattccgttcttagtgacaagagtaactttgctgggtggctctacacaactgtatgcagaggggagcccctctaaagagctaaagatcagctcgttatttaaacttccagtttctgtgaagccaagttggaatttaaagcatggtgtgtctgtgtccagagtccccagggggagcctcctagtgagcctcactggacctttgtttttgtgaaaagaaaatcacttaattgctgtggagtcacattttcctggtgactttgctgcagggcatgacgatttcattgtcccttggtggaggaggaagtagagagacaaaggatggggtgaggtgcccaggggctcctgagtcaccaggggaggcagggaacagggtccccctggaagcttctgggcctcccctctcaggtgtgggggcccctcctgtgtggctgcaggagtgaggctagggcgggtggcccctctcatcaaggtactctgacagtggccgggcactggcgggcctggggttttgggttatccagagcgggcatgctagcacctgctttcacggatggagactggctttaggggaaggctgggggtcaggaccagctgacatgtggccaccagtgaagtgacctggggcaagcttctgggcctctgtgcactccatttcctcagctctaagggcyttggctttgtgtgtggagcattcagatataaatccttagtggttttctgggggcaaagagaagctcccagatgccctccctccgatcctgccgtgtaacctggttgcgctcttcccaggcatctgggttcctccctccctccctccttccctccttccttccttccttccttccttccttccatggagtctcgccctgtggcttaggctggagtgcaatggcatgatcttggctcgctgcaatctcgcttcccgggctcaagtggttctcctgcctcagcctcccgagtagttgggattacaggcacgcaccaccacacccagctaatttttatatttttagtagagacagggtttggccatgttgtccagtctggtctccaactcctgacctcaggcgatctgcccacctcggcctcccaaagtgctgggattataggcgtgagtcaccacgctggcctttctgggtaatttctgacaaccaaacaactctatcctgcgtttgctagaattttccagaaaatccagggagggagaaagccttctctttggtgttgcatagacttgccctcaggatcctcagaacctgtatccactactcctcagcgggagagctggaggtgggagacccaacccttccttctacaaagaagggagcggcctgtgcagtttgcagggcagaaaccctggagacactgtgtcttaaggctacataagaatctcctctgctcgggccctgcgatctgcagcctcaagtattcacctccaattccagccctcctgctggggtgcaaggcttctaggcacccgccggctgctcctctccccatacccctggactggaagagtcctgggggccctgcatggcaggaatgtcctggctstgggtgcggaagaagaggagacagatctcaggagcccccctcaccgttgggatagaagcccttcagccatcctctaccccagggccattctaccacccctgaacgccttggggtccagggtttagaaatcagcagggctaagaggtgcccccgtagtgtttgtggaaaggaaggaaagggcacgttcrgtacagacctgccacaggcagatttgtgaagctcctgggcggccccttctcgcctgatcccccaccgcagcttgcccgtgtctggaggctgcctgcccagcacccaaaggcctccagtccctacctgccctgcctcacacctgggcaatgccccccactcctcccactccatcttacccaatttcttcccttggggattccccagatgactatcgaggtaaggggctgggcctgagtagcacgcctctgtcttactcctttatttactcactgctttgtctatttgaattaccatgattgactttttgttttttgaaacagggtctcactctgttgcccaggctggactgcagtgattcaatcactcctcactgcaacctgcctcaccctcctgagttgctgggactacaggcacaccccactacccatggctaatatttatttatatatatatttatttatttggtagatacagggtctcgctatgttgctcaagctgatctcgaactcctgggctcaagtgatcctcctgtcttggcctcccaaagtgctgggattacaggtgtgagccaccacacctgatctcattctgttttagagacttcttggtggtccattatatcagatgggtccctagttgacaaacattgaaatggcttcctgtcttttgtaattacaaaccattctgccacaaaatatggtgtttgtagcacatgagccagtatagcagaagaatacatttctggaagttcaatggctcacacctgtaatcccagcactagggaggccaaggcagaaggatggcttgagcccaggagttggaaactagcttaggcaccatagggacgccctgtctgtacaaataataataataataaattagaccgggcgaggtggctcacgcctgtaatcccagcactttgggaggccgaggtgggtggatcacttgaggtcaggagctcaagaccagcctggctaacatgggtggaaaccccatctttactaaaaatacaaaaattagccaggcatgatggcgggcacctataatcccagctactcgagaggctgaggccggagaatagctggaacccggaggcggaggttgcagtgagccaagattgtaccactgcaccctagcctgggcaacagcgagattcagtctcaaaaaaaaaaaaaaaataataataataaataaataaataaataaataaaatttaaccaggcatggtggtgtgtgcctgcagtcccagctacctgggaggctaaggtaggaaggtcccttgagcacaggagtttgaggctgcagcgggccatgtaacgccattgcactgcagcctgggtgacagagtgcgaccctgtctcgaaggaaacaatacagcttttttagaatttgtctaggaggttttctggttttcaccagaaccaacccttgcctgcaaatgtttgatagatactctaaaattactctctagtgaggctgtaccaatcaacacctcatctcagcagtgcgttgatgctcctgtttccccaaggactgccaatgctgtattaggagttttctttatacactgaactaattggtgtaaaagatattcctgtgcaagtgaggttgagctttcttcctcacgcttatgagctatttgttgatgctcttctgtgaacctatagacgagcatttgaccaggcctcctcacctttaatgctgcagatgtttaacttggggaaattctagtatctgacacttgaactacgtaaggggaaattctagtatctgacacttgaactacataaacaggtctcactgttacaataattgtccccatgcttgatgggtttttttttctctttttcttttttttttttttttttgagacagagtctcactctgttgccaggctggagtgcagtggcgtgatctcggctcactgcaacctctgcctcctgggttcaagcaattctcctgcctctgcctcccgagtagctgggactacaggcgtgcgccaccacgcccagctgatttttttgtattttttgtagagatggggtttcaccatgttggccaggatggcctcaatctcttgacctcgtgatctgcccgcctcagcctcccaaagtgctgggattacaagcatgagccatcgcacccggcctatttttaagaatatgggtttattactttaaaatgtatttttatcatttattaccatttgtttatttattttcttttttttttttttttttctgagacggaatttcattcctgttgcccaggctggagtgcaatggcacaatctcggttcattgcaaccttgcctcccgggttcaagcaattctcctgcctcagcctcccgagtatctgggtgcctgccaccacacccagctaatttttttgtatttttaggagagatggggtttcaccatgttggccaggctcgtctcaaactcttgacctcaggtgatccacccacctcaacctcccaaagtgcagggattataggcatgagccactgtgcccagcctatttgttacctttttaaccgtttttttttttctttagacagagtctcactctgtcgcccaggctggagtgcagtggcaccatctcaactcactgcaacctccacctccctgattcaagtgattctcctgcctcagcctcccaagtagctgggactacacaccctggtaatttttgtattttaagtagagacgggttttcaccatgttggccaggctggtctcaaattcctgatctcaagtgatccacctacctctgcctcctaaagtgctgggtttacaggcatgagccaccacgcccggccaaccatttttaagtgtacagttcagtggcgttaagtacgttcacactgctgttacaaccgtcaccaccctccacccacaggactttttccattttgaagaactgaaactgtattcattaaacagtgactcctcctttcctcctcccccaggccctggcaactacctttctactttctctctgtatgaattaggctattttasgtacctcctatgaatgaaatcatatagtgtttgaccttttctgcctggcttattttactcagcatgatgtcttcaatgtcttacagcatgtcagaattcccttccttttaaggctgactagtgccgcattgtatggacacaccacattctatgtatccactcagctattgatggatgcttgggtcgctcccaccttttggttatttttgtttgtttgtttttgagatggagtttgtgacctccacctcctgggtttaagcaattctcctgcctcagcctcccgagtagctggaactacaggtgtgtgccaccacacccggctaatttttgtatttttagtagagatgaggttttaccatgtgggccaggctgttctcaaactcctgacctcaagtgatctgcccaccttggcctcccaacatgctgggattacaggtgtgagccactgagcccagccttggctattgttaataatgcygctatgtttatttttattagttatttattatttattttgttatgatttactattttattttcagtttctcttatttccttttttttttcttcttcttttttcttttttttgagacagagtctccctctgtcacccatgctggaatgcaggggcccaatctcagtccactgcaacctccacctcccaggttcaagcaattctcgtgcctcagcctccgaagtagctgggattacaggcgcccaccagcacgccaggctagtttctgtatttttagtgagatgtggtttcaccatgtcgaccaggatgatcttgatctcttgacctcatgatccacccgcctcggccttccaaagtgctggggttacagacatgagccaccccgcccaaccgtagtttcttttattttctatttgcaaaagtaatatgtttttaacaaattaaaacatagcattacataaattcatggaaattgcaggtctccattcttgtatccatgaagataatagccagtgtcaacagtttggtttctttycttttaggattcttatttaggtatatactgacataattttttaagtggggttatatgctttacatgcctaaatgctttattttgaaccaatttcaaatttccagaaaatatgaaagacaatgaaaagaattctcagccaggtgcggtggcttgcgcctgcaatcccagcgctttgggaggccagggcaggtggatcacttgaggttgtgagttccagaccagcctgaccaacatgaagaaaccccgcctctactaaaaatacaaaattagccagtcatggtggtgcatgcctgtaatcccagctactcgggaggctgaggcaggagaattgcttgaacccgggaggtggaggttgcagtgagccgagatcacaccattgcactcaagcttgggcaacaagagtgaaactcagtctcaaaaaaagaaagaaaaaaaagaaaagaattctcatacttttcatatacttttaccacatctgctttctctctgtttttgtctctgcttctgtcttttctgtctctctttctgaactctgaacttcttcaacagtaagttacagacatgatattcctttacctctaaaaactttagggtgtatttcttaaaaataaggacatcctcttatataactttagtatgatgatcaaaatcaggaatgcaatactggtactcggtctacagatttcacttggatatcaccgcttgtctcaatagtgtgctttctaagctggggacagtggcacatttctgtagtctcagctactcagaaggctgaggtgggaggatcacttaaggccaggagtttgagaccagtctggaccacacagcaagacaccatctctttgaaacaaaaaaaaaaagcacactttctaccaaaataaaatgtcatattttctcagataataataaaaactgagatggcttcctgtcttctgtcataaattgtcatgtctctttagccttatttaaactggaacacttatacagactttttgactttttttttctttttctttttctttttttgagatggtgtctcgctttgttacccaggctggagtgcagtggcacaatcttggctcactgcaacctctgcctcccaggctcaagcaattttcctgcctcagcctcaaagctttccagcctaaacctggaagagtttagggtttagagtagctggtattacaggcatgcaccactacgcccggctaatttttgtatttttagtagagatggggtttagccatgttggcctgggtggtctcgaactcctgacctcgtggtccacttgccttggcctcccaaagtgctgggattacaggtgtgagccactgcacccagtctttttgaccttgatggctctgagttttttaagtgtttaggtcagttattttgtaatatgctccttaatttgaactcgtgctgcttcctcatggctagacggaggttatgcagttttggcaaaacactgcacaagtgatgttgttttcctcagtgcgttgcaggaggcacacagcattggtcttttccatgtgtatgatgttaactttggtcacttgactaaggcagtatctgcttaaatttttttttttaaacaaggtaaaagatacagtgaaatgtactcatcttaagtgaacaggctggagagtttagacaaataagtatcatccatcagtgtaaccaacatcccaatcaaggtctttatatattgtttacagtgcttttttaattaaaaatatggtttgtccatcttttatgggttaatataaatttttttcctggcattttacataaagctgccagagtttactttagacaaacatggaagagctaatttccatgggccttggagaagtgtagatttatgatcaatttctgcttctaccctagtttactgtgtagggtgacctttagctctctgagtcttaatttttttcatctctaaaatgggaatgtcacttagctcaaaactttttctcaagaatggagtcttctggctggacacggtggcacatgcctgtaatcccagcactttgggcggccgagtgggtggattgcctgaggtcaggagttcaagaccagcctggccaacatggtgacaccctgtctctactaaaaatacaaaaacttagctgagcatggtggcagacacctgtaatcccagctaccagggaagctgaggcaggagaatcacttgaaccygggagatggaggttgcagtgagccgagatcacaccattgtattcccgcctggacaacaagagcaaaactccgtctcaaaaaaaaaaaaaaaaaaagaatggagtcttcaaracacctaaaaaattatatatatcaacaaataaaattttttaaaagaggctgggtatggtggctsatgcctgtaatcttagcactttgggaagccgaggcaggaggatcacttgaggccaggagttcaagaccggtctgggcaacatagcaagaccctggccctaccaaaaaaaagttttttttaaatgaacaagccagtaaaaagccggcaaaatatatgaacatgctatccacagaagaagaaaatagccttttwtagagtcaaacatgagaaaagatgtccagcctcactgatgatcaaagaaatgcaaatcaaagcaacaacgagatataatttttcagacatcagattggcagagattaaaaagattcataatacctgtgttggcaagggtttagggaagcagacagtctcatacactgaggtgtgagtgtatactgactttgtacatgtgtagggtagtttagtcttgcttgttaaaactgtaaatrttcmtattcttaattccagaagttgcttccttagcaacttattttttctttttaaatgcacttttctttttaaaaatgtatttatttgttttttaacaaagttcagttttctgatccaggcaacttattttttatctatacctgcacaagtgagcaaaatgtgtgtattattgtgacgccatatcaaagtgacaataactcaaatgtccaatagtagagaatttgttatgatacagctatgaaatgaaatacagtacagtaaatgaaaggaatgaggaaccagtcttctcccgtgaaaaggtgttcacaacaaactgtggagtgaaaaaagtacatttaacacagtatctagactcttagttccctttcaatgagaaaaattttctgattaagtaatactgcaattcactgatgaccatcrttaatgatcacagctaagtcagggctgtttgcgttatgtggaaccagggctttttctagcagtagaacttcatagaccatgttattctgagacgtttctggtgtcatgtatatgcctaagggccacaattctatgtagttaaagacttcacagaagggcacgtgtgatggctcatgcctgtaatctcagcactttgggaggccgaggcaggtggattgcttgagctcaggggtttgagaccaggctgggcagcatggtgcaatcctgtctctaccaaaaatacaaaaattagcagggcatggtgacgggtgcctgtagtccagctactcaggaggctgaggcagaaggatcacttgaacctggaaggtggaagttgcagtaagccgagatagcaccactgcactccagcctgggcgacagggtgagaccctgtctcaaaaacgaaaagcaaaaaaaaaaaacaaaacaaaaccttcacagaggctaggacaaggagcactaaacagtcattagcaaaatgatgagtgagttmtctttttaggtctgttaggacagaaacaagtaggggtgccagaattcattgattcattcggcagacattgctgagcagctgctgtgagtcaggcactgtggtaggtgctggatttatgtaaacaaataactactcaaaatattataggggatgtggtgataggagacagcaactcccacaggtcgctgtgaggataaaagaggaaccgttggtagcattaaaataggagctccgaaagagcagggactttgttttgtccatgacattttagaacagtgcttggcgcatagtagttgttagtgcttggcgcatagtagttgttagtgcttggtacatagtagttgttagtgcttggtgcatagtagttgtttgatatatgaaatttgctaaacaaatgaaccaatgaatttatggagtcagggtcccaacagataacagaagatgcacttgcaaattatgccagagataatttgaggagaggctcattatagggagacagagttatgtgtgggctataggagaatcacaggaacccaggctggtggagagacattgtcacaacccctaggctggcagggacaagaggattgaggtcactggaactgggagggaaccagactctccctccttctgatctcctgccaaatctacccaggagtcatggggcagagaacccaaaacagtccacccaggttgcctagagcatatctcaaggtgtctcttgcagactctgatacctcacaatggtatcaggcaccaaactccatgaagaatcctgtgagataaggagtatcatccccattttacagctgaaaactgtaaaaatgtaaaaacattttacagacaaaactgagattagttaggtaacttacctgaggttataatcagtaagacgctattaactactgttctaagaaatgccatcgcacggatggagatttaatcccaggatgggctacagtgacggtaaagatagcagtgtggcctggtggccgagagcctcacttttggagtccacataacgactggatggttggaagggatggggcacattacttctctgggcctcagtttctccatctgtaaaatgagatgatacccaacttttgggaatttttacgaggattaaatgaggcaatgattatagaatgtttgatacttgctcgactccactaaataataggtgatatcaaaagaagaccttaactctgtctggctgggcgcagtgactcatgcctgtaatctcagcactttgggaggctgaggcctgaggatcgctttagccccggagttcgagaccagcttaggcaatatagtaagaccttgtctctacaaaaaaatttagaaatgaggtggaggatcacctgagtctgggaggtcaaggctgcaatgagccgtgatcataccactgtattcccatcctacctgggtgacagagtgacatcctgcctcaaaaaaaaaacaacaacaacaaaaaaaccttaactcacataaaccatgcaagtgttaagcctttggaaatatgccagaatatgaaatgtgttccctcttgggtgggggagtatggttgttcaatttttgttaactactttatacttgtatttttccattcttgaccataaacacatgactctgggagtcaggaaagcaagttgctacctctscctccttcctttgcttttatcagggtgtcccgtgtccctgcctctgttttctgtgttgggccctaggcctctgggctccggtctgagtggctggggtggccagcgtctgcagcagtggaagaccttgtactccatgtaggattcagtgacttgagtccgctcctcctgcaaacaccacctccctcctgagggcggggagaatgtggagagagagcctgaggcaatgatttggatcatcataactttcagactttgatcctagtttgacttgttttccaactggagttctaatggcttagccttctggagcagactctccttgctaccagatgattggttatgtcaatattcataataatcctgtaaaatgagtatcatccacattttataggtaatagaacggaggctcaaaataattacatcaatttagctaaaatcggcagggtgcgatggctcacacctgtaatcccagcactttgggaggccaaggcaggtggatcacttgaggtcaggagtttgagactagcctggccaacatggcaaaaccccgtctctactaaaaatacaaaaattagctgggtgtcgtggtgggcctctgtaatccccgctacttgggaggctgaggagggagaatcacttgaacccgggaggcggaggttgcagtgagtcgagattgcaccactacactccagcctgggtgacagagcaagactctgtctccaaaaaaagaacaaaagaaaaaaagaaaaattggctaaaatcctacatttggtaattggcagagttgtggccaatttgagcccttttgccttcaaatgctgtactttctgaagccttcagtgtgtttttcagagacaaaaagttttaatgttctaattgtaaaagcaatatctgattataattggaaaatatgtaaagtaggaaaaacactttcacgtcgtcatagccagtgcccatactgcctgtaggagtttgtatcttggtatttttccaacattataatacacgccttgttccacagtattaggaattctttgaagctttatattcaatggctctctaataatccctcagctggatataccatcatttacttaaacaattccttattgtcggaccttccagctgtctccagttctttactgtcagcagcgtgctgtgaagaacatcgttttattcagaaagctttttctgtttgtcccatttccttaagatagcttcccagaagtggaattactggttcaaaggctattagcatttttttttttttttttgagacggggtcttacactgtcacccacgctggagwgcagtggtgcaatctcggctcactgcaacctccacctcccgggttcaagcgattctcctgcctcggcctcccaagtagctgggactacggcgcccaccaccatgcctggctaatttttgtatttttagtagagacggggtttcaccatgttggccaggatggtctcgatctcttgacctagtgatccgcctgccttggcctcccaaagtgctgggatgggattacaggtgtgacccactgtgcccggccgctattggcattttaaccctcttcatacatcttgccaaattattcccccaaagggtgtcaccagctacttttcctgccagcagcatgtgacagtattttgaggacagcttcctactctaaccggctctttttcttctctctccaaagcctcataaggagaatggctcagagcgtggtggaagtcatggaggactcaaaggggaaggtccaggagcacctcctggcaaacggaggtaggtagggcggccctctgatgtggagcacaatctccccgctccctctagaccagagtcgtccttgctgtggccacacagcaatcaccgagatggcccaggtctcagtggatgctctggattgacacattgggcagaggctctgcacttgcttttatttatttatattattattattttgagacagagtctccctctgttgcccacgctggagtgtggtgcaatcttggctcactgcaacctccgccgcccgggttcaagcgattctcctgtctcagcctcctgagtagctgggactacaggcacccaccgccacgcctggctaatttttgtatttttagtagagatggagtttcaccatgttggccaggctggcctcaagctcccaacctcaagtgatctgcccacctcagcctcccaaagtactgtgattacaggcgtgagctaccatgcccggccaatttttattatgataattttcttttcttttcttttcttttctttttttttgagatggagtctcgcttgtcacccaggatggaatgcagtggcgcaatctcggctcactgcargctccgccttctgggttcacgccattctccagcctcagcctcccaagtagctgggacaacaggcgcccgccaccacacctagctaattttgtgtgtgtgtgtttttagtagagatggggtttcaccatattagccaggatggtcttgatctcctgaccttgtgtccgcccgcctcggcctcccaaagtgctgggattacaggcgtgagccaccgcgcccggcctattatgattattttctgagacgtggtcttgcccaggctggagtgcagtggtgtgatcatagctcactgcagccttaacctctcaggctcaaggggtcctcccacctcagcctctcgctcaccaacacacctggctaatatatatagatatattttttgagacggagtttttctcgtgttgcccaggctggagtgcaatggcacaatctcggctcaccgcaacctccccctcccagattcaagcgattctcccgcgcttaagtgattctcccacttcagcctcccgagtagctgggattacaggcatatgccgccatgtccagctagttttgtatttttagtagagacggggtttctccatgttggtcaggctggtctcgaactcctgacctcaggtgatccgcccgccctggtctcccaaagtgctgggatgacaggcgtgagccaccgtgcctggccacacctggctaatattttttattttttgtagagatggggtctcgcaatgtcgcccaggctggtcttaaactcctgggctcaagcgatcctcctgccttggcctcccaaagtgctgggattccaggtgtgagccactgttcctggctggtgcactgcttttagctcatcagcactgctaggtttggaagttgttccccttcataaattcatggctctgcagttccgcctctactctaaccagctggtgaactcctcagagtgctgcagataaacacagggtccagggagctcagcccggctcctactgtttgcccctccaccctctccagagccaccactctccccacctgggcaattctgcctcctcacctcaccctcaccgatttatccctttgcccaaatcaggtatgagaaatgccttcctgtgctgaggaaggcctccagccaggcttcaattgccgtccagtaaaaagaacagaggctgcaccctgaaggcttcctgcagtgcagtcacgttgggaatgtctgcctcgttcgtgctgatgggacgaacctttagattccagtgatgttttggcccattaactgtgtgcatactatttcagtgcctttaaagtgtgcaaggcaaaacctttgagactttggaaactttagaattaaatgtttaaatatctgtagagataattaaacttacatgattctatgcgtatatattgaaaatgagagtagagattatactgggccagtgtggtggctcacgcctgtaatcccatcactttaggaggccgaggcaggcagatcacctgaggtcaggagttcaaaaccagcccrgccaacatggtgaaaccccatctctactaaaaatacagaaaaaattagctgggcgtagtggtgcacacctgtaatcccagctacttgggaggctgggggaggagaattgcttgaacccgggaggcagaggttgctgtgagccgagatcgcaccattgcattccagcctgggtgacagagtgagactctgtctcaaaacaaacaaaaaacaacaatagataatactgtatttttactgtaccttttccatgtttagaaatatttagatatattgccgggcgcagtggctcacacctgtaatcccagcactttgggaggctgaggcagatggatcacgaagtcaggagttcaagaccagcctggccaacatggtgaaatactgtctctactaaaaatacaaaaattagctgggtgtggtggctggcgcttgtaatcccagcttcttgggaggctgaggcagaagaattgcttgaacctgggaggcggaggttgcagtgagccgagatcgcacattgtactccagcctaggagacaagagtgaaactctgtctcaaaaaaagaaagaaagaaagaaatatttagatatacaaatacttaccatgtgctacagttgcgatagcctaggtgtgtagtaggcgataccacctaggtttttgtaagtgccctctgtgatgttcacacagtgacaaaaatctcctaatgacacatttctcagaatgtatccctgtcatgaagcaacgcatgactgtttacactatatgtttataataagatttatatcatttgttataaatataacatatatttatagttttccctcttgaaaacatgaggagactttttttttttttttttttttttttgagacagtctcactctgttacccaggctggagtgcagtggcgcgatctcagctcaccgcaacctctgcctatcaggttcaagcaagtctcctgcctcgccctccagagtagctgggattacaggcacccgccaccacacatggctaatttttgtatttttagtacagactgggtttctccacgctggccgggctggtcttgaactcctgacctcaggtgatccgccagcctcggcctcccaaagtgctaggattacaggcgtgagccaccgcgcccggccagaggagactttatttggctgtttaaattgacatatggaaatgttcctaccccacctgtgatcttggctttgtrtgtctatatggcttaataactccaccttattatattgcaggcttgaaaggaaaaatgaaatgtttaaagagtaggttatgcattgtttgctgtgtctgtgcttggcgtgatgcccgcatgtcccgggaaggtggaatctcggtctggttgtattggtacagtgatcaagttaccacgatttctcaagtaacaaccttgtaacttggtcacaatatccatatgacacagataaccaccatctcatcccctcccctctttgtcctgtcatccctgcctctcctgggcagcactgcatgccgcctggaagctgggaacgctttgaccttgtggagttcaaggtgaactcctgtctctttctgcatgtggtctgcttcttgttttgatcctgacacgatgtcccgactgcctgctctttgagcccgtctgttttatggacactggaaccttaaactccaggcttcactttgtgtggccttgatggggttcagacatacaaggagcctccagggcagtcccggtgcccaaacaggtctttccttgtgtgaatgttagagggagccatttgctttggattttccccaacccgctcaaactggtagaattaaaaatagcaaatcattttaggttgcataagaatctttagagattggcagttatcaaatgccttcccaaatgcagtttgtttgtcacactgagattttttgctgatgctaagaaaaaattaccttgtcaagttgaccaagcgggtctgatttctcagaaggtcactcctcgggcccgggactgcaaggctgacttcaggtagagaactacttttctacataaacaacagaggaactttagcttatattaaaatagtgatcaaagtgcttatgttttacgcaaaattaatgtaacsttaagttagatgttagtattatgcagtatccatccccagtcccgatggtagcagcagtggcctctcttctcaggagaagaaaattcagcttcatttgttgaacgggctttatgacctctgtgcctcccgtgagtcgggtctcaacttcccaagactagagctggtaaagcacattctgaagcctggaggctgtagggaggctgaggtgggaggattgcctggggccgggagttcgaggctatagtgccctgtggttgtgcctgtccatagccaccacacgccagcctggacaacatagcaagaccttgtctcttaaaacaaaacaaaacaaaacaaaacacagcatgtgctataaaccaggccagagagacctttttttttttttctttttctttttgagacggagtcttgctctgtcgccaggctggaatgcagtggtgggatctcggcacactgcaacctctgcctcctgggttcaagcaattctcctgcctcagcctcccaaatagctgggactgtagtcccaggcgtgtgccaccatacctggctaatttttgtattttcagtagagacggggtttcaccttgttgtccaggatggtcttgatctcttgaccttgtgatccgcccgtctcagtctcccaaagtgctgggattacaagtgtgagccaccgcgccggccgagaggcctttaaacttagtttgacttgggctttcctaatattacctgaatgaggaaatctttctcttctgcagggcacccatgaactagtgattgacaggatgaaccagaggcacacattgttgcattttaatcctatctcctccgggggcatttagggcaccactgcctgcagccrgtcagacctggtccaaaagtcacttctggagtttccttttctcaactgtagatggactgaatggcttcaaaggctcttggcttcgtcaggaccggttgtttctgcttgttccttgcctccagcagagctgggagcaggaaggacacagacagctttgattgcagccacagctggcaaacacaccttgcccggcctgggccctggaatgcccacagaagacagaaaccctcgaggcttgtctggcttgctgggcgatgggccgcagtctggttggtcacagtccctcatgctgctgcctgccgggcaggcctcctttttgttctcggacaagaccatcattgctcaagagttgccagcctgtgcacagcatattttgatgaggggtgagcctgcctgggtcatggcctgacctcatgagccctcagccaaggtctgcgttgccccctctgaggcccaggctttagtgactgcaccccaggcaggggaggcaaggcctgtgtgttccaagcagcagagggcaagctgtggtgctgtgagtacagaaggccggaggggctgggcacggtggctcacgcctgtaatcycagcactttgggtgtctcagcctcattctgacaacaagaggtctcaatctgtcaactagagacatttagtcaaaggagactcctctattrtctcacaatatcactttgctcagagaggtcaaggagcttatatcaggtcgcacagccagtagaagttggaactggcatttaaatgtgagccttactggttcaaaagccctagttcctaccactgctttactggctcccagatacctctcgccaatttttcattggcttgtggtgaaatcagaaaaataaagacaagcagttttttgttttttgttttttttttttttgctttttgaaaaaaaatatataaatcttattttaaaaagcaagatctggctggtcacggtggctcatgcctgtaatccagcactytgggaggccgaggcgggcggatcacctgaggtcaggagttcgagaccagcctggccaacatggtgaaacctygcctctaaaaatacaaaaaatggctgggtgtgatggcgtgtgcctgtaatcccagctacttgggaggccaaggcaggggaattgcttgaaccctggaggccagaggttgcagtgagccaagatggtgccactgcactccagcctgggygacagaacgagatccatttcaaaaaaaaaaatagaaggccagaggggtggcagagggccgtcctcagacaacattctttccaaaggcagggtgcgtggacagggaagggcttggatgcctgacccagggcaaggctcagtgtacacagttggagctggtgttcaggacatgtgagagatgaggaagaaggcacagtcacacacccagaggcttctggaggcccctgcagggagacataatctcagacttccctgagcatctgtcagtaaccaagcacatgctggacatgcagaggtgatacacagtctttgccttctggaagccacagccttgctggggctcatagtgccacatgcaccccatggtctttggaaacaaagaccaagctgcaggaagtgggttcagtcttggaggagttacagggcaggggtgcttcagatggaaagggagacctcagccctttggtctgaatgccatgaagaccttggacttggtgcaaatggccagagacaagagcttsatctgaaatgtatctcttccaagccacgtagacagtgcgagctgataccacagtcatggttgccggsgggggtctgtcagtgtttgagcatgtttatggagcacttgctctgtgcagggtactgcgacaggctctgggaacacagagaccagtgagtcacagtctctgtcctcgaggagcctgagacagcacaaggagtggagttcaggccagcaggggcagggacagttgggccacccctggaaggagttggtctttgcctgtcctacgtgttgaaggacagaggtactgtgagaggagagtagggagttgtggggacttgcctggggtgtcagaggggacggggtaggaggtggagggaagagatggatgggacagcacacaccgccctgtcatctcccatcctgggctgccgcttggtgccttgagactggttcccagcttgtgggatggctctgggcccatggtgggaggtgagcttgcctgtgcctgtgcartggggtcctggaggtgagtttcactgtcgttcctgccacaggaggagtccccgccatcctcctggttaccctctgaccactccctgctcttacttccaccccgggcctgtacccttgctacaaggtcattcccattgtgtgtggcaataccaaagcctgtattaatacccaaactaataccaatgtctgagtcagcctggactgctgtcacaaaataccactgactgggcagcttaaaccacagactaagatcagacaacctggtttctcctgagggctctctgcctggcttgtagayggccaccttcttgctgcatcrtcccatggcctttccttggtgcctgtatgaggacagggagagcacggatccaactctctgctgtcccttcttatatggcctcgaatcctattggatcagggccccacccttagtgcctcagaggtactctcgtcaacaggccaggactcgccatgttaattccaacaccagcatcctaagtctgtaaaacaaattctcccaaggacttcttccgagtcccggtggcctagaaggtgtctgagtttggttgccgggcaggttccacctgcagcaaggytgtgtccacttagtgcatgtggcagggaggggagccgtggccctgcctgggccctgcagggcgttaggtgcttcacgccttrtctcactttatcctggaatttccacagcttgctctgtgccagcgtttcctcatctgtaagatggagatcatcatagggttttaatggggttgaagcataaattttttttttttttttttgagatggagtctcccttcgttgcccaggctggagtgcagtggctcattcttggctcactgcaacctctgccccctgggttcaagcgattcttctgcctcagcctccccagtagctggractacrggcgtgtgccaccatgcccagctaattcttayatttttagcagggacggggtttcaccatgttggccaggctggtctcaaactcctgacctcgtgatccacctgcttcagcctcccaaagtgctgggattacaggtgtgagccaccacgcccggcaaagcataaattaaatggaataattcatgtgtcttggcccaaggtcagcagcagtaagtgccagccgctttaatggtcattgtcaccgtcgtcgtcctgttatcttcaggcctttccttcgtctcacgtgctggcatttcttccccagcccgatttcctcctctgagtcccatttcattcccatctgcttcttggggacctgtccacccacatgtcaaactcaagcttgtcccaggcagaacttgcctcctctcctccatccccatccctcccacctccatggstgccyggcttagagcacttccctccctccacccagccacccagmgagaaagctggcgtggccaggcctgcgtcattgccttgcaccctgtctagtcggtcctcccctgtcctcctctcccctcccagggctcctcccactcctcttggcaccaccctctccctcccacgttcctgctggcttctcccctggagcctcctccacaccagcctcagaggactcccccagagtgtgtgagtgtccccagcctgctgcccttggtcagctggagtcttgtttggtgaccccactgggcgctgctgttggggttggaggaatctcagtccaattcccgtgctaggggctgagtgggcgggatctagtgttgttttggcacgtggtgaagtgcagacatgacccttggtgaccgatcctacccctttctgttcagcatccgtccacactccctcttccctgactcacagtgccccgagtacgtagcgctgccagccctcctcrcctgacacccggcgccctccatcaccggccacacggccacctcctcttccccttagcctccaygtgaataccatgtctgtgtcccagtgaagggacacgatcctccctaggaggagccggcgccagctctttgtcctcccttagcactctaggcggttatcactgggcccccagctctctgcggtgtgtctgcctaggggtctccctgtggaccttgggcagggggtggtgtctagtgtgtgtccccagcagggtgatgggtgtggagtgagcgtgacagtcccctttcatgcaccaggatagaccaggaagtgtaggtgcacagggagcctaggctgggacatccgccatgggaagggccctctgccaggggcacaggaattccaggggccaccgtggcgctgcagcttccagggaatttcccgctcttccatagacccggcgtattaaaagaggtcaggtcctggggcggctggcccaggtagctctcttcaagagtgtggagaactaacctgaagagagcaggcaaggtgccactccgctgtgtctcaggtagggaaattgattccctcctagcctagagccctgggggttgagtcagctgaggtttattcagtgttgcttctttctgacttcaattctggggctctctccaccccacacctggttagaatgagccagaggcatcctgaaggcagtgggttttggggaaagaaaagaaaaaaaggaaatgcttgaaaacactggtgtggtctgttccccagagacttttctctaaatagcatatactgaaaaacgcacctccctgccgtttaatataaaccacagtcacacagtccagtattttgctaatgtgtaaaatgccttctttgtaatggacagtgaagattgaaactgtctagtgcttgggctgacagctcccactggctcacagctccccgctcccgcagggaacgtttgcttttccagagccctgtgcctgccygccggcgttgcccatgatggctgccttcgtgtccacgctgatgcttggcttgggattccgaagtctcaatcatggatgcagagcgcaggctcatgtgttgaaatgtgtttgtattcttccagttgacttaacatcctttgtgacccactttgaatgggacatggccaaatatcctgtcaagcagccgctcgtgagtgtggtggacacaatagccaaggtgagaaaagggactgctctggggaacagctgactggtgggtcaggcgggcaagagcckgggtagggcccccctgccaacagcctcagcctgtcctgactgggcctctgggtttctgaggtgtggcctccttccatgcactgggcaggtttggggtttcagggcagccctggacagggaaagagccagtcccctggcctcccctcgagggcccagcacccattcacttgctgctccacttcttttttcaaaagttactgatggtggccgggcacggyggcttacgcctgtaatcccagcactttgggaggccaaggtgggtggatcatgaggtcaggagttcgagaccagtctgtccaatatggtgaaaccctgtctctactaaaaaatacaaaaattagccaggcgtggtggcgcrcacctgtagtccttgctgctcgggaggttgaggcaggagaatcacttgaacccgggaggtggaggttgcagtgagccgagatcatgccactgctctccagcttgggcaacagaatgaggttccgtccccccaccaaaaaaaaaaaaagttactgatggtgaaggcagctccctcatcatctactcctaggaacctgacacctctagcccccaggggattgttcacctkcaaagctatttggtttaagtggagagtttggcctgggagccctaacctcttcagacactgcaccagctcgttgctctccacttgtgacaatggagaggcagtgagtgtcctgacagtcctctgtcctgttcagcaatggcctccactccacttgataaaatgaacaccctgtgactcgagtcccaggggatgctatgggcacctggagctgggtgacttctctgtatcatcactgaaggtgagggtgacaaggactgtgagactgaggctgatggtttctgatggcctggccctcccttctgccacaaaacactgagcccctaatgtgtcccctctcctgctggcccccatggctgtgggagagtctcggcctgggccaggaacaaaggcacccggttttctactgtgactgtggccaagggtcagagtggagctgggcctctcacctgtcctctggcagctcctgcaggtctcctggaaagtagggtggggccagaaagctcgggaatctgggtggggcacctcgggtgctgcttacatcagagaggctcaggcccctgctgggacgatcaggcagtgattctggaaggcccttcaaggagggtgtgcccagagcacctgtgccaggtgtgcctttcagagggcgctgtgcatgtccaccaaggaactggaagcacatgatggctggtggggctggcccttccctgcctcaccatgtgccaatttgggattctctcagtcccagggatgccagactcagtgggaagggccccctggagcacatggagggagcagaggggctgtcgggagamctggcttctccagtccagagcacccctagagtgcctttggcaggaaggaaggagggcactggtttggtggcattccagatgtgcccgagactgtgctgggctctcttactgtccgcctcatgccatggggtggacatcactttcctctgagtgcagaagaggaagctgaggggttgagcgagcgatccaggacctgcagcggttggagtattatgccgggatggggatgcaggtcttggggaccagagcctgcggattgtgctgtgtgcatgacaccacttcccaaggaagccctggactggcccaaccacagggaagcagctcctggcagcagcaggggcagaggctccggggtgttgtctccctcagtccttcctacaccggcaacacagtgtgacaccccccgcctcagcctcgctctgccaacgagaggtctcaatctatcaactagagacatttagtcaaaggagactcctctatcatctcacaataattccaggccactttgctcagagaggtcaaggagcttatgtcaggtcacacagccagtaaaagtcagaactggcatttaaatgtgggccttactggttcgaaagccctagttcctatcactgctttactggctcccaaatacctctcagcaatttttcattggcttgtggtgaaatcagaaaaataaagacaagcagtattttttttcgtttttttgtttttcaaaaaatatataaatcttattttaaaaagcaagatctgtggattacacccatgtcagtttcctggttatgatactgcactatgacggtatagtgcagaatagtatcgtatagttgtataggacagtacagtgtagtcacagagctgtatagtgcaaaatagtactcatatagttgtatagttgcataatgccgtatactatacagttgtacagtatacttctatcgtgcagaagattttaatatagttgtatagttgtacaatatagttgcatagtacagtatggtatgtagttgtatagtgcagaatagtatagttgtatagtgagctgtgggaaatcactgtgggaaactgcatggaggggacttaggatctctgtgtactatttttgcaacgtcctgtgaatctataatcatttcaaaattaaaagttttaaaaaaattattataaaaagatgcattttattaagaaaaatggcaaaatgtaaagagaaaaacatttagtttttatctttaaaatcatcactttatctttaaatctttttttaattatcattttttatcttttttttttttttttttttgaggcagagtctcactgtgttgcccagactggagtgcagtggtgtgatcttggttcactgcagcctccacctccctggttcaagcaattatcctgcctcagcctcccgagtagttgggattataggcacacactgccatgcctggctaacttttctgtattttgagtagagacagggtttcaccctgttgcccaggctggtcccaaactcctgagctcaggcaatctgcccatctctgcctctcaaagtgctaggatttcagacatgtgcctggcccattttattatatatttttttgagacagagtctcactctgtcacccaagctggagtacagtggtgtratctcagctcactgcaacttccacctcccgggttcaagcaattctcctgcctcagcctcctgagtagctgggattacaggcatccaccaccaagcccagccactttttgtatttttagtagaggcagggttttaccatgttggccaggctggtctcaaactcctgacctcaggtgatctgcccgcctcggcctcccaaagtgctgggattacaggcgtgagctacctcgcccagtctaccattttaatataatcatttaatttaatcattttatcattttaattatatttattttatctttaaaattattttatgattttatctttaaaataataatatcatccgagctgtgatcatcgcccccattccctttattctcccaaaaggtaaccaatgtttaaaagttgacaatggattcttccatgtataaaaatgtgtatatttagactaaagctgttggcattctatggagcacccattttcttcatctgttgactcttgagattctcccrtcagcagccgtgtgctggcctgtagcatttgtggatgrccgtggtgtaaatgctcctgccgtggctggttgtcmaagctggtggggtgtcacsacgtggggctgcgaggagggaatgtgaaggagcctggcacagtcggctctcagcactggcattatccccgctgtggaacaaatggggaaacctgagccagtcggccagaaagcaggagggcgtggcttgagcccaggcctgtcttgtttctgtccactgcacctccctgcccctgccaacccatgagagggagatcggcacagccgagccaggagacatgggcatttgagagggccaggccatgtcgggtacccctggaagcaacgattgggggtcagcctgagctgccctccagcagagcctgagarggtaggtgtgggygtgggatgtcccgaccgttcaggatgggcttgaaatcaggaaaggttgggctcactgagtcatcctagaaaatccatcatggcttggcrcctgggtgccacacaggggctccctggaagggccaaatgctggtaaacagaagccatcccagcaaatgggcagggcagttatttttcttgaaagcaccatgagctgttgtggccatttcaaaaagttcagccaactccttcaatgctcagggtcacctggagcttttgctttcccaaaacagcaactggcgcagatcgagatggacctgaagtcccgaacggccgcctacracactctgaagacaaacctggagaacctggaaaagaaatccatgtgtgtatttgccagcctccacatctggcgggggcaggtcctggcgggggcttagcgcttgcctgtcctctcactgggccacctgggagtctgtgcccatgcatgagagtgagacagacagacaggtggaggcactctcacctctccaagagccgcgtgctgggagaggaggaaagggccaggtgagggtgatcacaccccgtgcatgtgcccagggaagaggatgtggccatgctgctcctcaccgcacgcttccatctcccagcttctccagggcgcctgggtgccgcccccagtcctcccctgtggaggctgcacggagggcccccaggggtgacgggaggccaggatgtcagcgcacggcccgttgcaaagcgcagcagggtggtgggctctgtggcccagagcagagcagcctcagggactcaggtgccttctccacccacctgaagaaccactgtgtgggagagggagcaggctccacagacagaacagtcaccaggatggtggagatgccagagaaaagtgtaagctcagcaacaccgtggcagggactgtcttgtgaggtgtagtgagtgtcctgttgttggaggtgtgtaagagaagccaggtggccaggctggtggctcatgcctgtaatcccagcactttgggaggctgaggcgggcggattacgtgaggccaaaagtttgagaccagtctggccaacatggtgaaaccccgtccctactaaaaatacaaaaattagctgggcatggtggcatgcatctgtacttctagctacttgggaggctgaggcacgaggatcacttgaacctggcagacagaggttgcagtgagctgagatcgccactgcactccagcctgggcatacagtaagactctgcctcaaaaacaaacaaacaaacaaaaaaaacagggagagagagaagccaggtgagctcctgctggagaggctgctcctgaacagggtggggtggggttggcatggaggagcagcccagtccccccagactctggatctgatgctgttggcggttctttgagaaccctggtcaattgtagagttttcaatataatacctacacttggcccctaactccagagaagggaagtggcgcagggagccccgaaccagctgccctccccctgattggcccactactgtaagcaaagagaatgttacctgggaggtacccccacttctgcaatccacttctgagggtcactgggccagctgtcttcctgtgaaaaaagcaaatggtacattagtggaaggaaaattaaaaaccatagatggtttttaggccaggcatggtggctcatgcctgtagtcccagcactttgggaggctgaggcaggtggatcacctgaggccaggagtttgagaacagcctgaccaacatagaggaaccttgtctctactaaaaatacaaaattagccgtgcgtcatggtgcgtgcctgtaatcccagctactcgggaggctgaggcaggagaatcgcttgaacccgggaggaggaggttgcagtgagccgagatcacgccactgcactccagcctgggcaacaagagtgaaactccatctcaaacaaaaaagcccacttcaactggaaacccttgctgttggatgcctggctttatgtcagaagtaagtgggcatgagctatggaggatgggacaggggccgggcgccggggcagagagccctaaggggatgggtcatctgtccgtcctggcttagagcccacaggccatggggccatccactcgcatggcatcaccctgagatggatttcttcaggattggttgggacttgtgcaaacatctggtctagcctcttcgctcaactggtgaggttcattcatccattgatcatcattgattcgcagtgactttaattgatttactaagygcatataccaagtataggagggcggygtacaaagagggatgaacgtttctaactccctcctctgcgctctcttttcttctttgtacacaaaccaagtatgcactgtgccctcaggccygatgctagaccctaaagatataaagcagaatacaatacaatttttgcacttgcagagctcacagttattcattcaacaaacgtgtggaaagttggcttcgtgttggggattcagaggtgagccagggagagaggtgggatagtgtaagggtaacgtgttcagtgctaggacagggaggctcatgcatgcggtgcccagggagaaggaacctaagggctttatccatggccaygcagctggtcagtgatgttcaggcaggggacagcaaagaagccacgcaggctccctgaggagggtgtttcccattgcctttaaagctttggccatggctcaacgctggagagcgatttcccggggaagcactgtgtgccgacgtcacggcccctgtgctgatgccacatacagcctgggtagtgagatcttggcccatttactgatccgacagccttgatccatgtgccaataataccataccctacactcagaccaggtccactgggcatgtagaaagcatttcaggtgagtgtcccctgggtgctgggctgggaggcctgtaaagtgacacggagctctatcgaggacrgctcaacgcagccctaagagctggccgttgtgttgacacttgagtaactttagctgcctgccacccgaggccccctcccatagcagccggagctggcaccagggcagcgcaggtcactgaggtgttggattcggcagccccttgggtgacgggtgatagcacccgaggccctgccagcctccctgtccctggaggggaggaggcagcagctgtggccccagcacagagcctggccctggggttgtggggagcaatcattgctgagaattgctgtgttctcctaggctccagcatccctggcacccacccttccttgagaactgcccccagtgcccgggngtgggtgtgtgtggggtcactgtgtccctttctgctcacatctttcacaccctttgttccacctgccttttagggggaacctcttcacccggacactgagtgataytgtgagcaaagaggacttcgtgctggattctgaatatctcgtcacacttctggtcatcgtccccaagtgagtgctgggcgatcacgaaggaaacyggccctgcccagtggagaggaaggtggacccgttggtgacttgggcagtgtggacgaggakgctccctgcccagccccagttctcgggaagcagtcattccttcatggggccctgcctgcggctgtcagtagggacagtggttgggtgatggtggttgtggccacgatagaagcagccatttattgagcacttgctatatacccaatgtgtggtcgacattattttatttcatcctcaccaaaggcctgggaagtctggtgattcccattgtcctgaggctggagaggtcggttagcttgtccaagrtcacacggggcccggattagatggttattagcgagccccaagtgtatcmatagctcttcacaaagggacttctgtgggtaccctgtggaggctgggcaggggattccccatgggaacagcagacctcaggggaggtgagggctccctctgaccccatccctgctcaccttcaggccttcaggaaaaggggtgtgcagcttcctaggcactcaggacacccacgagccttttckgcaaaaaatcacgtaacgattctatgttcttrcagaccaaactactcacaatggcaaaaaacctacgaatctctctcagacatggtrgtccctcgatcaaccaagtaagtgagaccccagcttggtcccagggcccctggggtacatgtgtgggtgcttcagggcacccaaccaccaaacatgccccgagggtgtgaggctccccagctttccacacctgggccctctcctgtcccttggcctggaattctgtcagggtcgcccaccttgtcacatgccagagtgccttcctctttcaaaacttcacttccctgcccctgccctgggaaggctgccctggccccacctggccgagcagcctctccacgccgttgcctctgctgcattctggctctgtgttctcrgctcagcgtcaattcttccctgccagagggggaagccagccctggcctaagtggctgcccagtgaacggccacagcgggagccgggagggaaagcggcctcagcgtgtggccygcaggggccagagcagcagtagccagtgggtcctgtcacagtgacaggaggagagcgggttacagactgtccatcacgggacactgcrtggcgggggaaccaaggatgccaggccctgtgtgtcaggagggatgaaggggaaaggcagctgcagaggagcagagggtctgaaatggatgtgaaatgggcrtgactcgggcacacacaggtgcacaaggaattgtggggatgggtcacgggcaggaaggccacactcaggatggtagtggctcaggatggagtgagtggcacatagtggggtaggggcatgtgggctttcacctgctggaactttggttttgggtggctgatccaaagctgcgcgttttcctttttttgagatggagtctcactctgttgcccaggctggagtgcagtggcgcgagctcagctcactgcaacctccgccttccgggtttaagcaactcttctacctcagcctctcaagtagctgggattataggcgtgcaccaacacggccagctaatttttgtatttttggtagagatggggtttcactgtgttggccaggctggtctcgaactcctgacctcaggtgatccgcctgcctcagcctcccaaagtgctrggattacacgtgtgagccaccacacccagcttggtactcattttcctctgtacctttttgtatggccgagaaggtttgtaatttgaagaggttttagaatgcgcgtcaggcagccagcctgttcatctgactccccacacacagaactcccggtgcaaggcctctgccctggggcccctgctgggggacggggatctcccagggctacgagatggcaatcgggatctaaattgaagggtgcaaggaacaggacaatcacagcccgaggttacaggggaggcagggaagaggagcaaggctctggagcagaggagctggcccttgaagccrgtgtgctggcaggagcattcactgctcttaaaggccaagagccggggatccttgacagggccggctgccttggtaggtggcctggcctcccagaccagagcctcaggsccttcattgtcacaggccacctgaaagcctgcacagatgactctggaaatacctggagtctggcggcagcccctatgggcatgggctctgagaaacaggaagggtgaccctgccagcatgccagcatgctgtgagatcgtgtctgggcctgagggctcccacttccagtcttctggccaataggactcagagatgcttagactcctggccccaagaattcctgagttgctagagacagtggccccagtggtcctgtgttgagacttgcttgggaggctgtgtcccattaggactttgtgatattggaagtgaaatggaccttgtaggatagtttccaccactctgctttactatcaggcagcacgtcagagccagggacaccctgtgccagctgyggtgacrgaggcccaggagggcttggtctctcaggaatttgataagcgggagctaaagcccaggcccctacactccctgcaccccgaggccccctgaggccttagcctggaggggtgtggaaggggcaggagggaagggcaggcagccaggagttaggaaatctcagggagtgtccttggttccccagccctcagctgctgccatggaccccaggtgcaggccaccaggcccggggcctctgagccccactcccgcwcaaggcctagcagtgagtccagccaacagatgcttctctccaacagactcattactgaggacaaggaagggggccttttcactgtgactctgtttcgaaaagtgattgaagatttcaaaaccaaggccaaagaaaacaagtaagggtcctccnggtttggttcatctccygctgcggggggtctctgcccctctggaaagcttctgagtgaaaacccatgatwtgcttgttttaaggttcactgttcgtgaattttactatgatgagaaggaaattgaaagggaaagggaggagatggccagattgctgtctgataagaagcaacagtatgtgagtatgtgattgagcagctcctcccgcccctacccggaggcctggggatagaagagtcctcccaggtctccagctctccctcctccctctcattgtccccaggctcctgggctcacaccatggggaccgtctgttctcatgggacgcctgagcagggtctggggggaggggcggtgagcacaaaggagcccaggcggtggagctgggggcgggagccgggggcccacccaagctggcgctttccacatatgttctcactggtcctgagcaccgccctgccaggaaggggttgctagctccacagtatggagaaactgaggctctgagaggcaagctggccagaggaccctgccaggccttccttggactgagcaaggcacgtgggctccaggcgggagcatctgtgtgcagggtgggcagtgctgggccttggagattgcagccgtgaggtttccagggcgccactagcccctgtatttacctcccgtgtccttagtgcggagagggtgcttatctggagacttccgaccacagccactcagaaacccttcacggaggaggacagcgtagctcaccagggagcaaaactagatgctcacgtttgaattgtgagcaggagagctttgggaaggtccctccaccgctccgggaagtgggcaccttccatactcaggttctcctgctgcgatgctgggctaggctgggcaacttggaaggagcctgtctgggtggaatgtttttgggacccttcttcctcatgcccaccagggagggttccgtgagcaccttccagtccagcctctagtgacagggcaggaggaatgagtagaaagttcttgaggcctttgggggaaagtcactgtgtgaacacagcactgtgaggactcccatggggaggagcgccgtggccgcgggcaggctgggagtgctcccagtgtccgtgctgccaagtgtgtgctccgggctcctggggacctggcctgtctgtcagcgacctttttgcagggactggggatgagcagccaccccgtcacaagcgagcccagccacggagcccccgtagtggggttctcggagcccctctggtctggtctgtttccctttagggaggaaacaacagctgataatatacaagtttatatagggggtttttcaccctcctcctccgaaatagcacagggcgctcacacacgtgtgtgtgtgtgtgygcgcgcacgtgcatgtatgagtgtgtgtgtggacctgtgtgtgcacagcaagtgagacacacctcagagccagacgctgctgggctccggctgagcctgcggggagggtgtcgcctcctgaggacgaggagccgagctggagctgggracccccrgccctttggatgctccagtcytcagagcagggcccacagacccagacaccaggcaggaaagattttccccagtgaaagctgagctccaaagtgttttcttccttagrctcagctcacctgaaaccctcgytacctgggcacgccctggctgttctcttcagccaggctttttcccagctcgattcagtcctggtcccaaccccctgygcagtatctctggacggggctagaccgtggcagcctccacaccagggaggccctgctgggggacaggtggcgaagcagggcctttggcacccacctgggcactggcccaggcctgccagacccccggggaacagggtgacacacaggagcctgccgcctgccacgtggggctcaggttgccagctggcgtattttacatggcgtagccttcgcccacaccaccctgggggccctgccagggtctctctgtgggcgggaggtggaggcactctcagcttgggtagtcccactggcctcctgagaatctggccccctctggcctatctagaagtgcatgaccaaacgtcttgcatcctttttgtcactcatcaaccagagggacagaccaggccctggggtttgagtgtactttgagagcagagtgggatgtccctgtgtttcccacctgtttgcagagacagaatgggaaagggtgagtgtcctaactgcatgcccaactcatctcctgcactctgcatgccgaggtgccccccgaatgccaggaaggcatctgtggctgggcatggtggagccaccttgacagagcgcagagagccgtttccactaacgcctcccggtgctgtcctggtcggcctgcgatgggggtcctggctgagcccaagcaaggggagggagctcagggctgacccctctgccagagatcggctctgtgcttggaatatggaacccaaagaccttaacactgcccttctctctgccttcaccactccaggagcccggtgggcacctaccacatctctagtctagccagcacgcgagtcccgagggtgggcctgaattcctgagcttsstctcgcgtgcctttcaggcgatgagaatgatttatttgtttgtgatgcatgtttgctgaaagattaataaatcatttctgtgcctttagcaaacttcctgtgttgctcttaaaaagggatcatccaccttcccggaccacaaggttaaggtaaccccgctaggtaaccctgataggcctgctgcggggcagaccgacagagagagagagagtgagggcgagggtgaggtaagcaacgccccgggaaccccggggtccctggctcacatctcctcgccagctcaggcgccttctgggaaaatgaatccttgcatttttctgttctctaatatggcttttgaggtcttaaatttgaggagccggaatcatgccttcctcctaatctgcagggcctctttggagctgcccccgccagcagtgaagggtgcttgtcggccagggcgcctctccccgggcgcctggctggaggtggctggagctgggacgggcagggccctggctggggtggtggttggcagctcagctctcctcccttggctgcccttgctgaacccacccctgacctttgtgggcagctgcagtgtcaggygggagctcggggctcttgctccaagactcttgagctcccaggaagacctgccacaccggcatcagtggctgctgctgtggccacgtgaggtggggctgtgaggggaggcggctgctgtggatgatgccaggaccctgggggcagagcctctgagaaggtgggctccctggctgcacagtgtcaggcagaagcccctggctgcctgctgaaagccccaaggtcaggggctgcccagctccccgcgctgcggtctgtggtggccccgtgcatgcaccgggtggctggcccgctgagcttccccggcaccaggtgccctggacctcgaggtcctgagcctgacccagggctggtctgaccgactctctgcttctggctcctgggcacttcttctcagctcagggcgtgctctgtcaaaacccaagtcctttcttggctctgtgtcaggcggggtgttcagcaggggtcacctggctcttctgtctttgcagggccccctgctgcgctggctcaagrtgaacttcagtgaagccttcattgcctggatccacatcaaggccctgagagtgtttgtggagtccgtgctcaggtgcgtggcagtgatgccccggctgggactgtcctgaggatgggcagggtctgggggagctatcggggcaccccagctcctgccttctctccatcctccaccygtctcctttctgagactgtggctgttggcaacacgctcaattccgagtcaagtacaccctcccctcagccctgtgtcccctgctgtctgctccctccgttcctgctacacttggggcaagtgtcacctgggttctccccagctgccctacctgcatgcccttgtggaccctctggctggctcctgtccccaccctcgtgaagcccgcagggcccgagtggctcctggaaggcgctctcgggctgcctccgtcctcagcctggaagccgcacccctcaaggcagtccagagagaaaaccaaaaccacaccaacaacaacaaagcttatttygccttttttttttttatttgagatggagtttcactcttgtcgcccaggctagagtgcaatggcatgttcctggctcactgaaacctccacctctcaggttcaagagattctcctgtctcagcctccctagtagctgggatgacaggtgcccgccaccacgcccggctaatttttttatatttttagtagaggcggggtttcaccatgttggtcaggatggtcttgagctcctcctaacctcagatgatccgcccaccttggcctcccaaatgttgggattacaggcgcgagccaccatgcccggcctttgcctaataaaaaaaaaaatatatatatatatgtatgtatatatatatatatatgcccttgtcatggactgtcgagaccagcctggccaacatggtgaaaccccacctctactaaaaatacaaaaattagccgggtgtggtggcatgggcctgtagtactggctacttgggaggctgaggtgggaggatcacttgagcctcggagccggaggttgcagtgagccgagatcgcgtcactgcactcgagcctgggcaacaagagaaactccggctatagaaaaaaaaaaaaaaaaaaaacttcactgtgggaaacctggcaactctaggtaagcagagtgagtaaaaatctcctgtaattttaattttaacaccaggagagaacactgccagcgtcccagtgggtgcccttttaggtgtaggttttgttgtttttttatgaatagatacgtaattcttacagatttttatgaaagtggaatcagaggaaacgccttcgaaggccgcttttctgccctgtgtggctgcgtcccgcgtcacggagcactgcgcaccgcctgccgctctgactcgcggcctcctgggctcctccagcccctgagaccctctgtgtgaccttccggaccccttccccgcctgcactgaggagctcctcatccctccctgccgtccccctggctgatgtcccctactttccctcgttttcctgcccatgttccctggtytccaggtcctgccatctgcctgccgtaggctttacctgggtatctgtctcatctcccctcccgcaccccttcctctgcttccctgtttctgccagtggcctcctcatccttccccttatcagaccccaaacttcagggtcagtttagacacccctgacaggcccggtccactccgcctttgcactctctctttcacgggtctggccccaccggcctggctgttgccataagcctcctctctgttcttggcctccaattccccttccatgtggctgtcagtgtgtggtctgcccagatacagatctgaccttggttcctggttcttctgccctgcacatgcaccgcacccacacctgtacccatgcgcacctgtgcacgcccatctcaaaagcctgtaccgacacggatggcagcaytgggttggagggtgtacccagctcctgggagtgttctagccatctctaatatacatggccccagatcaaccctgcccggctcagaagtcggttgctctcaggcctaacggcctaacacagtgaagcctgtccatgccttccaggatgcgcatctgcccaagaaagaggttgagaccgatgggccagccgctcctggggtccttttttttttttttgagatggactcttgctgtcgcctaggctggagtgcagtggcacaatctcagctcactgcgacctccacctcccaggttcaagcaattctcctgcctcagcctcccctagtagctgggattacaggcgtgcaccaccacgcccagctaatttttgtaattttagtagcgacggggtttcaccacgttggccaggctggtcttgaactcctgacctcaggtgatccagcctgccttggccccccaaagtgctgggattacaggtgtgagccaccgcacccggcatggtgtcttgttctgggcagaatggagaaggcattattagcaggacgggtgccacagagacaggacagggccggaagaactcagaggctgaggaaaggttaagggctggagcgtatgtcccttaaggacctagggtgcctaccacccaccacagcgagcacaacagaggcaggcctctccctcaagccaggctgctgggggaggagcgccttaagctttaaggacgtgtcctagatgaataaacaacctccagtgcaagttggtaatgactgtggtggaattagcctggcgtggtggtggcgggcgcctgtaatcccagctacttgggaggctgaggcaggagaatcggttgaacccaggaagtggaggctgcagtgagccgagatcgcaccattgcactccagcctgcgtgacagagcgagattctgtctcaaaaaaaaaaatagataaataaaaccttagtaatattaataggtcctgctcccaggacttatctttatggcagccccgtctgcacagagtactaggtgagtggaagggcgtgtaaaaacagacttcacatcaaggcctggggatcccgagggaacataggtgctaactactgaacatccgatcctttgctccctcagagtataaaaatacatcaacaatcacaaaatgttttccatttacagcacttgctatattttgtgtgggctaacaccccaggaatagctcatcccaacaactggttttaaacatgctcaggcatacaactaggtatgttaaaaatgttttctatctacccaaaaactcagcgaaaatagtaacaatcttgataaaccagatttttgcctctcctttagtggagaaaaayggccgagctgggttttagacaaacgccttggagtccgaatgttcagtccaactacctgcattcaacttgagcatgcaccgtggaatggccattcatggccagagggatgacctcttttgctctatagttgaaaactagctatcagaaggrggttagcaaatyctagagctttttctatccagagatcaccgctgaccctaggcattttgctcgagtttgactttatgaagctgtgttsgttgaagcttttcaccctcggaatgtactgtttctsgtcaggttccttctatccgtgtttgcatttggagcagtgaactgacacattttgtctatctgaaaaggtatggactaccagtgaacttccaggcagtgctcctgcagccgcataagaagtcatccaccaagcgtttaagagaggttctaaactctgtcttccgacatctggatgaagtagccgctacaagtatactggatgtaggtatccagaamcagcagtatttctacagtaagctcagcatcttactttcaaaaaactggtatctgcctgtaatcccaacactttgggaggtaggtggatcacttgaggtcaagggtttgagaccagcctagccaacatggtaagaccctgtctctactaaaaaaaaaattgggctgggcatagtggctcacgcctgtaatcccagcacttcaggaggccaaggcgggtggatcacgaagtcaagagatggagaccaacctggccaacatggtgaaaccctgtctctactaaaaatacaaaaattagctgggtatggtggtgtgtgcctgtagtctcagctacttgggaggttgaggcaggagaatcgcttgaacctgggaggcggaggttgcagtgagctgagatcacgccactacactccagcctggcgacagaacaagactctgtctcaaaaaaaaaaaaaaaaaaaaaaaaaaaaaaaaatttgccaggagtggtggtgcatgcctgtaatcccagctacttgggagtctgaggcaggcagtgagctgagtccagcctgggtgacagaaactgtctcaaaaacaaaacaaagcaaaactatctgtcagcctgttatgaaaatctacatgtcatacacattaaagcacagcaaggagagggttggaggggtggaccacagctacgcagagcagaacgtacgctcagtgcctggcgagcttcctcaaaactaaaaggataagacaggaaactagtttatgcacttagagcattaccrtgtcttcttttgtaggcatctgtggagatcccgggactgcaactcaataaccaagactattttccttaygtctacttccatattgaccttagtcttcttgactagaaaggccagctggcacctctgtctcatgttcgtgcagattattacagacacctctttcctttagccagagaatggttcaaatgtcttacagaactaagatctttttcagagaaattgctcacaaaagttagtgacagttgtatttatttttttaagttacaataaaatgctctcaagtcctttgaatgttcyaacaaattcaaaacttcattttctgaatgttttacataaatgcgaactacctgttcgcattggtaacctgctgctgtatttcatrtcttaacggctattttgaggttcattaacwacayaraaagccttgaactgtataaccagctagattccttaataattagtcactagagacagcccaaagacaaatattgggcaggaaatcagttctcactgagcccggtttccatgtaaaatctctgttgtggtgggcataggtggcaccatctaaagaaaagaggtcttgttttttgtttaaaaaagtttgtggggaggaaagacatctgtgtatcacttcaaaatattgatttactgctaaacatcactctgaatttatgatgtggatactaacttcatacatttatcggcattgtccaaaatattttattctttaatggaaaaagccattaatattcaaatgaagggatcacattaaaaaaaacccatacataagaaacagcctccaagaacattcaagcagcagtcagagagaaaaatgtttcgacagccaagttttcttcaaaatattatgtgacagaatacgactcaattcaccggctacaacaattcatagaatttttcaatgttttcttgagatgcaaaagttcactgttgcagtgttttcaaatgaccaatcaagtactacttcttggttaaaaggccactggtagagtcatctgagtgtagagaatgtcccttcactgctggaaaaatccactggctcccaagaaaagaaaatggtctgaagcctctgttgtggctctcacaactcatctttccctaagtcatcaagctccacatcactgaggtcaatgtcatcctccacgggaagctgggagacgacagaaagccactgttagatctgcagaaggggacaccctggaaggtcaacatctcattttatggaagagcgactctctggagctactcctgctacaatccaggttctcctcagtctgactcctaccctgaccttcgtacctatgattatacggatggaaaagctcagaactcaggtgaaacatttcaacatcacatcactcaccattttaacactggaagccacttgaacgtgtccttttgaggagggtgggacacaacagtacagaaataagtgctaatttcaaagctatcattttctatttttctaagataaagtaaatgaattccaggttaaatgttcactttaaggtaataatcaggaaagcaaccttactactgaaatgtatcttggctgtcaagagtatcaaatgccatgcagcacttaaacttgtgataaggaagatgaagggtcttcagagaagaacctcttaaaaggcccacgggtgcaccagggctgaggtctgatgggaaggacttgactccaggtgcagagatgcacaggctcaagagagtaaaccaggactgctgcccgcacagcttccctcccgggcactcacctcgccatccctgccgtcccaaggctctctctcaacgatggtagggaaagccccgcctcctacaggtgccgtggagccacgcccaaaagagagctcccttagggaaaaatgaccaaaacacacacacacatttacaatggactgctggtgcagaagaataaacaactttaaaaataacagtctgcctactttgtttatgcagaggcatttcttctctcttgctgcactacattcctcagaaacaccttgaggacattatctttttaatcacggacaacattacaaccagattcaacattcccaactaagccccctgcatcagataaagtcagttgctatcagtaagcttttaaaaatagcagagcatttgctgaaatacaaattaaatacataaataattatcaaagttgatctagaacatgggctgcctgcgagctttctaagactgctgtgaacctgtacagagggagcatatcagaagtgaggcgactggttccagtgcgctggcagagagcggggtgcgtatgtgcataaacatcagtacttgaaacataccagacctggtgtaatctggctgttgggaaaccagagccagaaatactgtgggcacaaatatttagagttcaccaaacaactcatagaataatagagctagactaacaatctatggcaccaatgggctagaataagcaaacctattattagaaaaaaaaattacaggagatatattcacattctgacttcatgatttaataaatactactctatgacaatcacaaacttaagcagtccacaaacttctttttctttgagaccaagtcacactcttttgcccaggctggagtgcagtggtgtgatctcagctcactgcaacgtccacctcctgggtgtgcctcagcctccctagtagctaggactgcaggcctacaacaccacacctggcctattttttgtatttttagtagacataaggtctcaccgtggtggccagcctggtctcgaactcctggcctcaagtgatccgcctgcctcagactcccaaagtgttggaattacaggcgtgagccaccgcacccagccccacaaacttaatgaaaacacccccttggccaggcgtggtggctcacacctgtaatcccagcattttgggaggctgaggtgggtggatcacttgaggtcaggggtttgagacccgcctggccaacctggtgaaaacccatctctactaaaaatacaaaaattagctgggcgtggtggcaggcgcctgtaatcccagctactcaggaggctgaggcaggagaatcacttgaacccgggaggtggaggttgcagtgagccgagatcgtgccagcccggacgacacagcaagactctgtctcgggggtgggggggaaagaaaacacccattaaccatattaaccaactacaatgagagagagctgggagggaaggagccacagtctgccccccgccggcagaggctgaagcagctgatctcacagggcttcctccatgcctcccacttcactactcaaggcagagctgtgactgaggcacctgactttggagcccctactctccacacagcacacacacacgtctccacacagcacacaaacttctgtgtcaagtaggaagactggcagcaagagcactgcaggctttcatgtactgttcttcctattcattattcaacacaagcctctcaactaccttttgtgtgctgaacatctcttatacagcagctaagaaatgaacgcggaagaaagcaagaatgggaaataaaacctctttaggtcaatgccctgtattgcctaaaagatgattaggtgagctgaatagcagagcagagtagacagctctgtatattggttttagaacctatcatgttgtttgcacattgttggagtaacttaagtacgcccattttcaaataaataactacattccaaagccaagtgcccagaaatggaaaccacatttccccaaggtcaagattacaatgcatatgagggtgaggatggacagacagggctgcctctagcccatatgagacctttatgagaatgagaaagagcccagggccagatgcacagaatggcacacagggcggcccgagggtagcaatgctttctcctcatcccgcaagcagagtattccatggaaaaaagaacgaacagggagacaatttaaaaactctaatgtataaacattcaattctctggaattagtttgcattttaaattccatttattacctggcttatatatacctagttccaaatataaacctacaacagaaccaaacaaacagacaaaacaacaaacaacctaagaaaacaaattacctgagaaactcgttgatgccttgctcactgaaggagccttttagcagagcaaatttcatcttgcgtgcattgatggcggccatggcggggtacccaaaccctccaatccccaacgcggtctcaagttcagactgggctccagcttctgtccacagccacctagaaaaccagactggtttttagggcaaatatgtcttttaaattgcttacgatctaactagaagatcttagagaacaaaagatcacgcttcagatatttcgtagaatgacaaataaaaacaaaagatgagtttctatatggattttccctttttacctgaaatcccaccaatatcatttgggttattaagcatgttctcgcgttctgtaggcatctaataaacatttgctggactaatggaggaggagcaaggtcatcgagagagggacaacagggggcgctaggtacctggggaaagcaatggatactgaggacaagaagcaaaaagataaataggaaggaggctgggcacggtggctcacgcctgtgatcccagcactttgggaggccaagataggtggatcacctgaggtcaggagttcgagaccagcctgaccaatatggtgcaaaccccatctctactaaaatcacaaaaattagccgggcatggtggcgtgcgcctgtagtcccagctacgcaggaggctaaggcaggaggatcttttgaacccgggaggcggaggttgcagtaagccgagattgtgccactgcactccaccctgggcaagagagtgagactctgtctcaaaaaaaaaaaaaaaggataaaataggaaagagatacactgttttgaaaatgtgcctagatccagtccttaactcagaagaggagaaggaaacaattctatttcccctttctcacccagccttcaagttcacagtagaattcaggtgcactactccttatgtgtctgcctgctaacctggcactccaatcaccatgtaaaacatgattcctatgagaaaaatgcatgctgtgctgacagcccttcattccttcttttcctcccatgataaagttttcacatcctgaataaaaacatatagcagagcaggccgggtgcggtggcttacacctgtaatcccaggactttgggaggtggaggcaggtggatcacttgaggtcaggagttttgagaccagcctagacaacatggtgaaaccctgaccctactaaaaatacaaaaattagctgggtgtggtggcgggcgcctataatcccagctacttgggaggctgaggcaggagggaaaaaaaaaaaaaacatatagcagagcaaacatagaacacagcttacaaaaacacgggggaaccactctcaagaaagcctataatcagctgttcagatgacactcagacagtaagctcagtaacttacccccacattttctttttgtatttgtctgccaacttcagaagaacttccagataagaatttctgcctgcagctcctgatttaaatagacaaagttttttaaaggtaaagataaaggagtccataaaattaatccatttagaaagtattctcagagcatctagcatagaacagctaagggaaatcatttccgtctgtcttaccagtatcaaggatatggggcagcacagccacaacacagagctggtgctcctcacacgtcctcttggcaatgtcctcgttgataatctgtgggacccaaaagacaagggacaatcaggaggctgcatgatacaacacctaaaggtaagctggcaaacaagaccttcgcaccgtcactttcattgaaaacatttctcccacgactacttcctcgtatggaaacacctggaggcatgttctctaagaggagatttttctgctactgattcttaagcctgtggaagctgtggtggtggaggtggggtgattagcacacatacaaacatctctgaaatcgcaatgcctggacacagcctggctctgccacttacttgtttaaatagattatacttacatgtattatatgtcttatatgtttatacacacttgaggctctgtgcctcaatttccccatatataaaatggagattaaaaacagtatctacctctcagtgttcatgtgagaattaaatgaaaacaaaacaaaacaaaacaaaactatacaaagacaccagaacggtgcctgttacatgattagtacttgataaatgttctattactttgagaatgataagcaagagtgattgaatacactctatctttaagaagctcgtatttctgttcagtgtaattattctaatgctaaaagttatgaaaagcaatttatcagactttttttccatttcaaagtatagaaaccactttaaagagagtatctttaagggcataaaatgaacagtgtgtcacactgctttaacattcctcaccatcagctaaaaaagctttctggactacaagcagttgaagtggtttacctcaagcagctcaggaggtggggcgttatcagaaaacaaatcaagggcccgggacacgatgtcggatcttg

SEQ ID NO: 94968 - DNA, 34504 bp, Homo sapiens
  misc_feature (1)...(34504): n = A,T,C or G
caacaggaaaaaactcataacatggaaggcttatgaatatttttatccagttgccatgtggggaagcccaagctagtcatgtagagagagagacagagaggtcccagcctcccagccaaccctactaagaccctagatttgtgaatgaagctatcctggatattccagccccagccaccatctgattatgaccaacaccagctacacaatttgtggagcccagtgcaaaatagaaatgaaaaatccattgttcaaaagttatttagaattttaagatggcaatagcagagcattaaactaactgcaaggtccctctgagtgtgggactctctgcagctacacagcttgcatgcctgtgaagctgaccctgactgcaaccttataggatatcccaactgacaccacatgaagcataaaaacatttcagctgagccctgcccaaattcctgactgcagaattgtgaataaataaaatagttgttgttttcaatcacaaaaataactgaaataaaatggtgaatcctttccagaagatttgcaatttacttagctcagatccatcagaggaatcactatctatggcagccttacaaaatatatttcttaaaaaataagatttgaaagtcaaaatgactccttgatccatgagcttcagaatggttgttgtgttggcaggcatgaaaacaattttaatctccttgtacatctccatcagagctctcgggtgaccaggtgcattgacaatgagcagtaatattttgaaaggaatctctcttgtttttagctgtaggtctcaacaatgggcttaaaatattcagtaaaccatgctataaacagatgtactatcatccaggctttgttgttccatttatagagcacaggcagagtagaatttagcctaattatttagggccttagaattttcagaatgatacatgagcattggctgatgcagtcaatggctgcattagcctctaacaagagagtcaatctgtcctttggagctttgaagccaggtattgacctctctagttgtaaaagtcttagctgacattttcttccaatagaacgcttttaccatctacattgaaaatctgttgtttagtataaccatctttatcaataatcttagctagatcttctgggtaacttgctgcagcttctacatcagcacttgctgcttcaccttgcacgtttatgttacggagatggcttcttttctttctttttctttctttctttctttctttcttccttccttccttccttccttccttccttccttccttctttctttctttctttttttttgagacagagtctcgctctatcgcccaggctggagtgcagtggcgtgatctccgctcactgcaagctccgcctcccgggttcacgccattctcctgcctcagcctcccgagtagctgggactacaggcacccgccaccacgcccggctaattttttgtatttttagtagagacggggtttcaccgtgttagccaggatggtctcaatctcctgacctcgtgatccgcccaccttggcctcccaaagtgctgggattacaggcgagatggcttcttttcttaaacctcataaaccaacctctgctaacttcatacttttcttctgcagcttcttcacatctctcagccttcatataaatgaagggagttagggccttgctctggattaggctttggcttaagagaattttgtagctgggttgatctattcagaccactcaaactttctccatattgtcaatagagctgttttgctttcttatcattcatgtgttcactggagtagcactattcatttccttcaagaacttttcctttgcattcacaacttggttaactggcacaagagacctagctttcagcctatctcagcttttgacacgtcttcctcactcagcttaatcatttttagcttttgatttaaagtaagagatgtgcaacacttcctttcacttgaactcttagaggacatagcagggctattaattggcctaatttcaatagtgttgtccctcagagaataaggaggcatgagcagagacagggaaatggaggaatggctggtcagtggaacagtcagaacacagaagacacacaacatttatcatttaagttccctgtcttatataggcatggttcatggcaccccaaaatgatcacaatagtagcatcaaagaccactgatcatagatcaccataacagatataaaataataataataaagcttgaaatattgcaagaattaccaaaatgtgacaaagaatcacaaaatgaacacatgctcttggaaaaatagcatcaatagacttgctcaatagagggttgccataaaccttcaagttgtaaaaaatgcagtatctgcaaagcacaataaagcaaagtgtgataaaatgaggaatacttgtggctggagagaggatctatagtggtcataaaattctcaaaggggtccataatctctaaaaggaccccttttaatttaatctgagattttaatttaattaatttaattttaatttaatctgagattagtgaatctcagattcacaatgtctttatcattcctcttcttaaaccctacagctactggcatagttaatgacattactaacttgctctcccaatctggtttgcctgcctccaatctcttctctattcttcaccccacacagaaaagtttacctaaagcacagttatgatcgtgtcatgctcttactccagaacagtcaatggcttcctattgcctgcggaatgaagtcccaatatggtacttgatattccagcaaaactaaactattttctcttcttcaaaacctctctctgcttcctcatcttttcttcctgcctgggagatccacctcctctcaatcattgcctgtcaaaaccctactcatcaatcaaggcctagttcatgtgcttctacctccaaaaatatttcccaggatactccatgcagaggtgatatcttctacctctggacctgcagagcattttgtttgggccttatgggagacttctagttgcatacccaaaattcattctctcttctttctgggaacagggccacctaacaaaacatttcctagtctttcttgcagttaggtgcgaattgtgactgagctcttgccaaagggatgtgagagaaagtgggatggataaatttcatctcacttgcttaaaaggaaatcccttgcctagacctcttctctgagctagaatgtggatgtgtccatgacctagcatggagcagaatcatcccactggcttagaccagccagcctgttatgcaagagagaaataatttgtcttactaaagccgctatattttagagtctccttgttacagcagcctccacattatccaagcacaggcttctctatggtagcgtattacattgtctgtgctttgtaattatttgtataaatgtcttatcaactttctttggaagttaactcctaatcggtcttcctgcttcctatcttgcctcctacactctgttctcagtagctggggtgatctttttaaaagggaagttagattatgtcactctttgctaaaaattcttactcagttaaagcaaaaacccctaaaataacctataaggttctgcatgatcagcactctccccacaatccctttttttttttttttttggagacagggtctctctctgtcacccaggctggagggcagtggcgcgatctcggcttactgcaatctctgcctcccaggctcaagtgatcctctcatttcagcctccccagaagctgggactacaggtgcttgccaccatgcccagctaatttttgtattttttgtagagataaggttttgccatgttgcccaggctggtctgcaaatcctgagctcgagtgatccgcccgcctcggcctcccaaagtactgggattacagacatgagccatcgtgcccacctgagtcccccaatcactgttttgttttgttttgtttagacagaatctcactctgtcgcccaggctggagtgcagtggtgcgatctccgctcactgctgcaacctctgcctcccaagttcaagtgattctcttgcctcagtgggactacaggtgcccaccaccacgcctggctaatttttgtattttttgtagagacgaggtttcgccacgttgcccaggctggtcttgaactcctgagctcaagtgatccgcccacctcggccaccctgagtgctgggattacaggcgtgagctaccgtgcctggccggcctccaatcactcttatctcattgacctcactttcctccttttctcttatagatacattccacctccaccacacaacactcgtcccgcattggtattcctcaaacaagcgagatacatctgccttagggtatttgccctttctgttctctttgcttatcgagatatcaacatggctcatttttttgttttttttttcctccttcaggtctttgcccaaatgttaccttccaagacaggtcttctctgaccaccctacttaaaattgtactcctctcctctacactctggcacattatcccactttccttgcctgatttttttttccacaacacttattgccatttgacatactatgcattttgcttatttacatgtttattgtttgagaatgtaaactccatgacagcagggtatttttaattgtttactaatgtattcttgtgccaatacacagggcctagcacataaagaatgttcactaaatatttattgaatgaacgaatcccttggggcaaatactttgtagtcccctcaacgccttgcacactgccttgcatgcaatagaacactcagtaaatatttgatgaatggcctatgatggaagactactaatattctgccttgcagtttacttccttctccaagtattcctatatacatgggcctacattaaatttctgagcttgtaaaagtgcaaaaaaggtcagaaggagaagtcctccatggacactgctgaaaatagcagtaagacaaagacaggatgctgctttgagtattttctgcctttgccacttagataaatccctctcccacctccatctcagttttatcatatgtaaaacgactatatgatctctgaggtcccttctatttttacatttggtagttatgagcactatggtcacttttgattccagaattgtatgatttttatcttctcctaacccatgcttaaaatatgcttaatggaaacatggtgcaagaataaaggctcacttaggtccaattaacaagtatcgctataaaaataataaaacatggtgtaaaaggccacattagcaacatgtagctgatgacattgaggcttacatgaggcagacaggactaaaacccaggttttttcaaatcccttcagggctctttatctgaagtcccatagaacactatactttctttcctttccgagggctataaaagttagatctttattgtccagatagtttggaaaatccatcttccttcacttgtttcaacatacttggttccagcactagaaacaaaacaactttctcttgcagtgtctcttggatgattcaggtggcatgccttcagtcacttcccccatgtaaactgtcttgcaggcaaaggcgacactgcaattacaatgggcaagcaaactccttgcatgcacgtctgtgatgtaaaagtgttttaattcagccccatccttataaagagataaaaaatgtgttcagaaacatgcaaactcgtggctgtcatcctgataaacagattttcttaaaggaaactgtaaaccagagccagacttactttcctgcgctgagggaggggaaataaaaaagcaggcatggttgatttcccgctagcgggaacgatctggcctcagacgtcaccagcatccctccacccccagtccaacgtctcctgtccccaacagcctagctacagggggccgggctatgggttagtctcgcccccgttcatgctcttcacccaatacctgagagaatcggaaggaggcagagctacaccgaggaccaaaccccgcccttcgctccctcttagctaatcgttgccagcggggtgtggacttcgccgctgaccccacctccgccgctttgggtaatttagagccgcgcgccgggcgggaatgtaagatggcggagtagcaacgcaaagcgcttggtattgagtctgtggccgacttcggttccggtctctgcagcagccgtgatcgcttagtggagtgcttagggtagttggccaggatgccgaatatcaaaatcttcagcggcagctcccaccaggacttatctcagaaaattgctgaccgcctgggcctggagctaggcaaggtggtgactaagaaattcagcaaccaggagacctggtaaggaccaagttgggaccctgactagacctcacctgcccaggcggcagagtataggagggatggggtcgccgcttgagctcaaacagactgggggttggggggagagggtgcagctctgtgactagcctaccccacgggctgtttccgttattttacctctcgcgggagggtcacgttcattcttaccgtgcggtggggtggagtcaaaagatggagtgtgaggcgaagcttctgcgtttgagggcaagggctgggggacccaatagatagtggctgcatagagcgacgagaggggaccgacgcttagccagggcggtagggacacgtggcttggctttgctgttgagccacccaggctggactgggttgcttcagctcttagactagcttgcatttagagagcctacctgcgtactgagctctcctggtctttcttttcctagagtccaataagcagctttttgattcgaaatggtgttggtccgttcggcttggtgttgagggaaactgacattatatactgcaggcgccaaaattattacgacttcccttagatcagcaagcgttggcttttctcatcttatgaatcatctacctgagtaattggagccataaatctagttgatttgttaaagtgatgcgttgactctgcatccttgatagccagcatctcagcttgagccatccaaaaaatcttggaaatctcaattctggaatgtttgaccttccccagtgcagctagtggtacagataatgcaaaagcgtatttttcagtaaccgagtccatcctggacttggctccttctttaagctctgtgtagggaatttaggaaacaattttatacctgaatgttaaagataattgaggacaggcaatgtagtggaagactaggattggacagtgcattgcaacttgcgttttttccattgccttgccagtaaaacttgcttcctcgactccgacttacaccctctaccggcaccatgggactgttttagagatgacttggttacctgattatttcagtgccccttccacctaagtgtgggatctttagtttctgataggtgtaatttgtattttattgttaccctatcgattaaatcagagccctgcccacaatcttacagatttgttaaggggaaagttttcacctaataatcagataagaatatttcgaatattttttcctaaatgtttttgcttacttttttgctttctttggactgatttccaagtttaactcgccttatctcttttagacccagctgataaagtaatgtcaccgataatggacagcttcttcccgaattattgtgctactgattgtgatgcaaatgatagtgtaaacattgccatctgtaaccaggcaataccttagttaaaagaggcttacaaactgctgtctttagatttttccaaaccattatggctcatgggccttaataaagaatacaaaacaggactagactttgtgattggcaatatagttaggggacaagaatgtttttcatttagaggttttctttggcccctgtggatatttaatccttttcctatgcgtctaggaaaaatgtgaaggcatgaaagctttattttctccttgtgttaatccttctgccctctgcataatgcagcaccccagaacctgaggctatattgggagaggagagggggaggacaacttagttttctactgattgatttctattaagtccaacatggataattgctgactggttagattttcttgtttctggcttaatcattagcttcttgtttcctagatattctgaaatcttcattgaacataatcacatttttttttatggagttccccctatctttgtttttcctatactgaagaaatggtaactgctccctataactgctcccccaggtgactcttggttgatgctctcttgagcagagtagcttttcttctaacataaggatcatccttggctgtctggttatttaggaaacacacacacacacacacacacacacacacacacacggagggggtgggtgttaaaagtgctgaaatcagagaacttggatctgaatccttaacctttctttgccccaataatctaatctgtaaagtagtacctacccatactgttgttatgaggattaaatgagatagaagtaaagttcttaggatcttgtccaaaacataataagtacaacagtaaatgttgacaagaaggggtggtgataatattgcagaaaatgtggaaaatttagaacacggaagggagaagatatgcctcttaattctgccacctgacataaatgtcacattatcatttctgacctcccagatatttgtgtaagatacactttttcaagaatgtttaatacatttatagctctcttcacttagcaatatattttgaacagtttctccctttaatatttagtatatatgattttctttttttattattaaagattttaatttattttttagagatgaggtctcactatgttgcccaggctggagtccaatagctactcacaggcacaatcatagcacactgcatcctcaaactcgcgggctcaagtgatctgcctgcctctgcctctcaagtagttgagaatacaggcatgcaccactgaggtgggctagttcatgtaattttaaatagctatatagtcttaccttatggttatgccataattttatataaccaaattcttattggacatttccagtttttgatctaatgcttttatatgaaaatccatgaacataaatctttgaccatttctgattatttccttagaataaatccctaggaaggtaattattaagttaaagggtagataccatttttcaggcttttgatacctgttgccaaattattccccagaaaagttgaacaaatctgtctcatcagcagtaatacaatattaataatatttatttatgtatttattttttgagacggagtttcactcttactgcccaggagtgcagtggtgcgatctcagctcactgcaacctccgccacccaggttcaagcagttctcctgcctcagcctcccgagtagctgggattacaggcacgtgccaccacgcccagctaatattttgtatttttagtagagacagggtttcaccatgttggccaggctggtttcaaactcctgacctcaggtgatcccccacaccttggcctcccaaagtgctgggattataggtgtgagctaccgtgcccggctataatatttaatgtatagtgaatgcctaagatgtgctagtttccatgctaagcatttagtatacattgtgtttaatcccctcaaaactgctatgaggaataactcttactatccctattttacagagaagagaactacagtaagatgcagagtaacttgcccagctctgggtattattgttcctttaaatttttgctgacaagatctctcacctggctttaaaaacttagatattctaaaattttgactctattctcttcaatatttgtaaataactttggtttatttggttattctgtactagctgagaggaggaagacttgaactttggttgcctagggttttcctgagaactgtatcttctggttgtggttagttaatcccatgtattttgcacatgccaatatctccataatctaaattcttcagattttcttaagactactatccaccttttagattcacttttggtgtttcctgacattccatttcaattggatacacttatgcctgaccttaaaggaaagggaaaagagaagctagttttttcactcattggatagacatagccagtcttctggcctcaccaaaacagctgagagaatgattggcccaaagccatttggagaacactccattaactagagggagagaacaaggagtattactctctaaattgctgaattaggtttttccacttaatagattatgttaggagcaaacaggttttaggcacaaatattcttctcgatcactgccataacttagaagaagccataagaataaggttaagatttttagaggacttgttgaaccaagctgtataatcagagtgcaattcacggactttttaagactttgtcaaacaaagtctgtatgttatagtactactatagggaaagattggttttaataagtgaaattagaattatacacattaaaacaaggcagtatcacctagtttacttgcaccaccttattttatttatgtatttgctttctaagtttctctacttttatttcatttttgtaagatcttttcaaaagccccacattttttaaacagttaaataaccttttcaagttattagatacatgccttataacaaacaccttctatgctgaaggtagcttttaattttaaaaagtttgagccgggtgcggtggctcacgtctgtaatcccagcactttgggaggccgaggcgggtggatcacgaggtcaggagatcgagaccatcctggctaacacggtgaaaccctgtctctactaaaaatacaaaaaattagctgggcatggtggcagacgcctgtagtcccagctactcgggaggctgagacaggagaatggtgtgaacccaggaggcggagcttgcagtgagctgagatcctgccactgcactccagcctgggcaacagagcgagactccatctcaaaaaaaaaaaaaaaaaaaagtttggctttgagaaatagctgagctgttgattgattattaagtgatataataacaaaaatggtactagcgactgtattgggtggtaagctgataagtgatttttatttatttttattttttgtttgataagtgatttataaaaaattattattcaagccttatgtgatgttagaatatgtatattttaaaaataatcaccttggctgggtgcggtggctcacacctgtaattccagcactttgggaggccaaggcaggcggatcacctgaggtcaggagtttgagaccagcctggccaatgtggcaaaaccccatctctactaaaaatacaaaaattagccaggcgtggtggcacacacctgtagtcccagctacttgggtggctgaggcaggagaatcacttgaacctgggaggcagaggttgcagtgagcagagatcacaccattgcactccagcctgggtgacagagtgagattccgtctcaaaaaaaataaatacaatttaaaaaataaaataatcaactctattaaagctatatatttatcagatgccctttgatgttttaattagcagtgataatttaatttttaaatagtatctcacctgctttcaagaaaggatttgaagtatgtttgatagtcactagtacaaaccgtttgttaaggtaggtatcagaagccttatagaaccatggactacagtaattgtggcaactatttggcataaaacaatttctaaagtttagtgttactttttattttatttatgtatttatttatttatttttttgagatggagtctagctctgtctcccaggctggagtgcagtggcgcgatctcggttcactgcaagctctgtctctcgggttcacgccattctcctgcctcagcctcccgagtagctgggactataagcgcccaccaccacgcccagctaatggctaattttttttttttttttgtatttttagtagagacggggtttcaccatgttagccaggatggtctcgatctcctgacctcaggtgatctgcccacctcggcctcctaaagtgctgggattacaggcgtgagccaccgccccagcctagtgttacatttttttaactgtatcccttggcttcctgacagccagagggataaaggcatatgcaatcgattatgtggtttttattttcataaagttatttagaaacttccaggcaaaaaatcctaagaattttatgggtgagacctctaaatagtgatatcgagtaacatcatggacaatataacaattttgtgggtattttttatattgactgatagttgaggcatttgtaaagggagataagccactgtggtctaagaatgttgttttctggtcttacttgataatgataaagttttttgttttttttttttttgagacagagtctcgctctctcgctctgtctcccaggctggagtgcaatgacttgatctcggttcactgcaagctctgcctcccaggttcacgccattcccctgcctcagcctcccgagtagctgggactacaggcgcccgccaccacacctggctaatttttttgtattttttagtagagacggggtttcaccgtgttagccaggatggtctcgatcacctgacctcgtgatccgcccgcctcggcctcccaaagtgctgggattacaggcgtgagccaccgtgcccagcgataatgataaagttttaaaaacatagcagaatagcttgtcccttatactgtctgatatcaattgtcaaactacatttgttcatttgttctccaacttttaatcaaacatcctgactctggcaagtgaatgtctggagcacagatgatactctgtgttcttgactgaaacaagagccataggcttctgatacatgattggaaatcaatatgcctgcctgactttcattctcctccagggaaatgcatattttggtcaaggagctgatatatggaggatgaatgtgagcagcattaaaattttctgattttttttttttttgagacagtgtctcactctgtcacccaggctggagtgcagtggcatgatcatggctcctaactcctgggctgaagcaatcctcccacctcagtctccccagtagctgcaatcacaggcacttgccaccatgcctaatttttaaattgttttgtagagaggaggtctctttatgttacccaggctggtctcaaactcttgggctcaagcggtcctcctgcctctgcctcccaaccacagacttgtttaacataaaacctaaaagtgactcttttagcttgaaatctctcgaagggcagagctagtagtaaagaaagatctgggccagacatggtggctcacacctgtaatcccagcactttgggaggtcaaggcgggcagatcacgaggtcaagagatcgagaccatcctggccaacatggtgaaaccccatctctactaaaaatacaaaaaattagctgggcgtggtggcgtgcggctgtagttccagctactcgggaggctgaggcaggagaatcacttgaacccgggaggtggaggtcgcagtgagccaagatcgtgccactgcactccagcctggcgacagagcgagactgtctcaaaaaaaaaaaaaaaaaaaaactgaaaacgtcccaaaagtcccttgaaatgaccactgcctgtttgttttgttttgtttggtttgagacggagtcccgctctgtcacccaggctggagtgcagcggcttcatctccccatactgcaacctccgcctcccaggttcaagcgattctcctgcctcagccccctgagtagctgggactacagatgcatgtccccacgcctaatttttgtgttttttggtagagacggggtttcgccatgttgccaaggttggtcttgaaatggggagctcaggcagtctgcctgccttggcctcccaaagtgctgggattacaggcatgagccactgcgtccagtcttaaaaaaggtttatcctaaactagtgcattttcttttttgttctggctgccaggaatctcagcttccttgattttaattggtttctagtttgattttttttcacttgcttttatttttcttgctttacaacataaactaaccccatttgtcttttcttgcttttgagatgagggtcttcctgtgttgtccaggctagacttgaactcctgggctcaagcagtcctcctgcttcagcctcctgagtagctgggattacaggtgtgtgccaccactcccagctccctttcatcttgggttagaaaggaataaataagtaattatctcctatgtcagcttcttctggcaatagaattgcctctgccagttttcatataagtcccttttggagttctccttgaagttttgtttggggagagaagggtgggtaaaagtgatcttgacagaaataggacagtaggtagttcctgaagccacacagaagatagtgcttagagtgagatagaagtatggatcttttatttaataactctattgccttttgatttgaactgaagttttctcttgttcaataggtattgtcagccattctgatctacttgtctatatacacacatacacctctccttcacctagaggattagttggaatataatgttgtttgaggtatcactaaggtgatttttaaaaatttttaaattattttcttttttttttcttaaacctggtgaacaggagaggtgatttttttttcttggtagagacccgagtatgggcactgaaactttcgtggtaaaatatagccctacttcatacttagagtaaattcctatggagttacttagtaattggaccagagtacagttaacacagaatgagggcaaggaccacattttattcaccattgtttccctagcatctagtacagtgatgagcatatgaacatttaatatttactgggtaaattgccagtatggtagaggtggtactgtcttttgttaaagtgtcattatagaacagtagtgattcactccttatgatatttctacttcttttgctatttatggactctgtaacagtaataggtgatgcatcaaattttatgtacatcacatgtacctatatgaaatgagatacaggccacctgctaaaattatggtccggttatttgtaagtactttagactaacatgtgccaaccatttcatgcatctttttcgtgtctgtcacatggtaatattagaaaatattaccatagaaaatggtaatatttgtatagtgcactggagtaaactgaggcagtgaactgcttctggtataaggctccttcagaggatctcctgaagcctaggtgatcaatatccacatgtagctgtaaccattcacagcatactagtagggaagctgttcttagaccttattgtctatagaagtatagtaaagtcatccctcagtatccacaggggattggtcccaagaccaaatctgcagatatgaaatagtgtaatataaatatatatatatatatatatatttttttgatatggagtcttgctctgtcacccaggctagagtgcagaggcacgatctctgctcactgtaatctctgcctcccggttcaagcaatttttctgcctcagcctcctgagtagctgggactacaggtacctgccaccacactcagctaattttttttttttatttttatttgagacggagtctcactctgttgcccaggctggagcgcagtagcgtgatcttggctcaccgcaacctgtgcctcccgggttcaagtgattctcctgcctcaacctcccgagtagctgggactacaggcgtgtgccaccatgcacggctgatttttatactttagtagagatgggttttcactgtgttggccaggctggtcttaaactcctgacctcaggtgatccacccatcttggcctcctaaagtgctgggattacaggtgtgagccaccacaccctgactaatttttttatttttagtagaaacgggtttcaccatgttgactaggctggtcttgaactcctgacctcaggtgatccgcccacctcagcctcccaaagtgctgggattataggcgtgagccatcacgcccggccatatgaaataatctatgcacatgttcccttatactttattgttatttatttattttttgtagagatggggtctcactgtattacccaggctggttttgaactcctgggctcaaatgatcctccttctaccctgccccctgctccccaaagtgctgagccaccatgccaggccctcccatatattttattttattttattttatttttgacacagagtctcactctgttgcccaggctggagtgcagtggtgtgatcttagctcactgcaacctccgcctcctgagttccagcgattctcgtgcctcagcctcctgagtaggtgggactacaggcgcctgccaccatgcccttctaatttttgtatttttagtagagatacatggtttcgccatgttggccaggctggtctcgaactcctgacttcaagtgatccacccaccttggcctgccaaagtgctgggattataggcatgagccactgcgcccagccctgccatatactttaaatcatctctagattacttataatacttaatacaatataaatactacgtaaatagttgttatactgtatttagaaaataatgacaaagaaaaaaatctgtacatgttcaatacaggtgcaattttttctccaaatattttcaatccacacttggttgaatccatagatgtggaacctatggatatggagggctgacagtacagtggtttaaaatctatttcatgttctttctttcctcattgtagtgtggaaattggtgaaagtgtacgtggagaggatgtctacattgttcagagtggttgtggcgaaatcaatgacaatttaatggagcttttgatcatgattaatgcctgcaagattgcttcagccagccgggttactgcagtcatcccatgcttcccttatgcccggcaggataagaaagataaggtaggagcagaattttattttttgagcagaggaagcaggagcacttgccccaaatcacaaataaattccaaaattatcaaatatatatttagggkgaattttaaaaatcaccttttcttaggtattaccctatcttcaaaacaatagaaatataattggtttgtataaagcaacacatttgtagtctgtattttattacagtgatacatatataactttcagttagctcactggtatttttaattgtatcagtaagactaagcaccaactcctctggagtactggagtatatttttaaaattacggtagatcctctcaaactgtaagattgggatcctagttgtgacctcttcataaaacttgaagtctgttatatgaatacttgatctgatagatacatagatagatagatagatagataaactatatatatctctcannnnnnnnnnnnnnnnnnnnctcaggagttttgagaccagcctgggcaacgctgtgaaactccgtctctactaaaatacaaaagaaattatccaggcgtggcgctgcgcgcctgtagtcccagctactcgggaggcagaggcaggagaattgcttgaacccaggcaggcagaggttgcagtgagctgagatcatgccactgcactccagcctgggcgatagagcaagactctgtctctacaaaaaaaaaaaaaaaaaaaaaggcatgcatggactttgctattttacagtgcagcaagtatgttttatttgaggagttcatagttgttggaaagttgacctccagatgagtaagtagtgatgtgatttacaaaggaaactataatatctattctgtgatgtatcttcaaaccttgacatgttaggtgttaaaggtttacatatgtatgtgttgaaagagattttaataaaattattttttaaagtctgcctagtttgaataattgagcattggaaacacttgaataggattgaaaatgtgtacattaagaaaacaaaagttaggaaagcattttctttattgataagtgtatcctgatttggaaaagtgatgttccacttaatatttgttctgaattatgatccacttaaagtcaatggacatgtctccttctatgaatttctgggtaccatagtgcctttaacatagtaggtacacaataaatagtttcttgagtaaatgaattgtttttcaaattggctttttggtttttcttttctttcctcccctccatttagagccgggcgccaatctcagccaagcttgttgcaaatatgctatctgtagcaggtgcagatcatattatcaccatggacctacatgcttctcaaattcaggtatcagtggaagctaaatattggtgtttgaaaggtgggaggaaaggactgatgatgctgaagactgcagagaagccaaaaattatgcccaagtacatctgaaataaactagatatcaacaacattttaaatgtgttcaccttaagcatacttcatgatcttagtcatttcaggtggttagatagggaggcagtctagttttatgggaagagcactactttgaataaaggctctggtatttactagctttgtaagcttgggaaggttacttaatttctctgaacatatactttttcattattgtgagtataaaacattaaattcatattataatgcctggcccatgacaggtactcatagataggagctgttattatcattcttattctccttgaatattcatggagtgcagtggcacgatcttggctcactgcaacctctgcctcctcagttcaagcagttctcctgcctcggcctcccaagtagctgggattacaggcacctgacaccaggcccagctaacttttttgtacttttagttgagatggggtttcaccatgttggccaggctggtctcgaactcctgacctcaagtgatctgcctgctgcagcctcccaaagtgctgcgattacaagcatgagccaccgtgcctggcctcatggtcttaaatttagagccacagatattggagcctactttccaacataaacccaaagtaaggggggtggaataccacctttattttatattttttcaaagagatttttcaaatcattacatttcaagcttgtgggaattcaatgaagtacattggacagggactgtactccttttatggaaaggaatgacttaattgagaaatacaactaatttgtatcaactagaattagaacacagatctcctgatttctaattattcactgtgactatttatcataagtagcttccattaagtttatatgccatagcatctctaactggtttatccattagcttttactccttaacaaatcagtccaacacttagtggcataaagcagtatttacaaactcactgagtctgcatgttgactgggcagttcttaatggttttgtctgaacttagccattctttacaagggctcacttatgttcctatgttcagttgtgggttgactgagggctggctttgctgatcttggctgggctctctcacatagcccagattcaaggaggcttttataatctaccacactgggcctgccttcccatcagtttgaatgttgcagtaagacattctctgagcaagttactactttgtgtttgccatttataaatggaagagaaggaaagtgaagcaaaactgatccagcttctttctacagggcttttttgatatcccagtagacaatttgtatgcagagccggctgtcctraagtggataagggagaatatctctgagtggaggaactgcactattgtctcacctgatgctggtggagctaagaggtatggttgaaattagtattgttcccaatgtactgggaaaatctttcagatggttgtgtcacaaagtgaagtttttctatccaagtggcagtttttaagtatttttgaatggatgtaagtagctagcacatgggttgaatatagttttaccctttcctcttttactgtcctcagttactactcggaagacaagacagaaaaggggtcctaaatcatcatattatggatttgactataacttatgagtaacttggtgctacagagctagcaatacagctataaaccttttgggaagggtagaaaatgtggttttctaatgaatagcagctgctattgaaccacatattggtggacaaattcgcttttacactcctcttacaatgctgttggttagatcattttgatccttgggattaaaatattaagcaggaaggaaagtaaagtgtgacatttttatttaaagccaagatcttaacattttaaacaaactgattgccagggattgccagttaacagtgctttgcagctcacatggtgcagactaagagctcttgatttccttagtggattactcgttagtaatgcattcaaaagtgtgacacatgttcttcttgttgtggaaatagaatgaagagctacaaaacacagatgattaggaagagctaattcagaactttctaaaagccattcaaatcttcaatgactgtttctcaacaacctcttttatttcagtaacttcaacagaactgataagctgagaacttgagttatgttatccagccagatatatgggttggtgagtcccatgtaattgctagttaccatctgtaatgctagagacagcctaagaaacatccccccaactagtagttgtcatatttaatttgtcggtcattattttaatatctttctgtgggacttagaaaatagtcacatttgaaataggcaggattttctttccaaaggtgggtataggaaaactgcctttagtagacaacttattgctacctgatttttttttcattatcattgtcttatagtgatggagtattttacaattgagtgtctatcacttctgtgttggcagggtttggggagtaggtagagatccctgtgtgatattcatttgtacagtagttctctcctcaaaaggtgtagagagttactttttctagccctttttatgctttgttggtcactgaatttgttggcctttgagtatggttggtttgggatacttgaactaattgatcatgcatttgccttgggtaagtaatcattccaagcgaattggttaccactgatgttatgtgcttatgcagtagtagtaatggagagtacagggtatggttggtttagatcaaggtacaaatgttacctagattatggttcaaaccttattatgtggtcacaggttctcacttatccagcaaaaactcatgtgaccatagtcacaagagaaacaggacaaaatgctatagtttgttcagttctacattaaaaaacaggacaaatccccaagcacgggctgcttcacacatgacggagatggcacagcggagcatggacagacgtgccactggggcagctcactgtcatttacactgaatagatttttgtttgaattatgtggtactttgtcaaaagacaaatttgtcttctatcctaccttctagtctggtttattttctcttgtaataagaaaaataagaattctctttgattggaagatactttggaccgaatggtgagatgcctagcttgtctgggtaattgatataactttctgtctagcaattgtgaaaaaaactcccaagcttggtgtccaggtacagttgacagtgacagttgatggatgttttgccaacagcactgagggaagtgatgaggacacaggcattggaacaggctggatgctgctcctctcctgccagtcaggttctcttctcaccacatccccattcacgggtcttccatgatgggaattgggacagtctgtgtactcctggcattagttaattctttcctcattccttctgctgccaatccattaaataaacttgcgtgtcttagcgttatactgcttcccagtactggtgagggtgtctgtcctctacccagaatgaatactcatctaagtttgatcagtacgttcataagcttctgttgagctatggaggcactggtttataaaacccagtttgtgatatttgcctttgagaagtcaatgatagttgctttcattcttccagccctgggaactattggtttcaaggagtattctcctccccaaaacaagcccattctttagtccatttctttttttcttttttttttgttttgagacagagtctcgctctgtcacccaggctggagtgcagtggcgcgatctcagctcactgcaagctccagctcctgggttcacgccattttcctgcctcagcctcccgagtagctgggactacaggcgcccgccaccatgcccagctaattttttgtatttttagtaaagatggggtttcactgtgttagccaggatggtctctatctcctgaccttgtgatccgcccacctcagcctcccaaagtgctgggattacaggcgtgagccaccgcccccggcctctttagtccatttcttttgtcttagaagccacacatacatatgaacacgctctgttttgcagagtgacctccattgcagacaggctgaatgtggactttgccttgattcacaaagaacggaagaaggccaatgaagtggaccgcatggtgcttgtgggagatgtgaaggatcgggtggccatccttgtggatgacatggctgacacttgtggcacaatctgccatgcagctgacaagtaagtgtggattgatggggctggtagttagaaggaaaaagctagcaattgctgtctgaatgtcttcagcctgctgattccttttggaaccaaattgaggggataagtaactttgtgagatttttatcacccaaggcttaaattataatacatagaaattgttgagtactcttatttttttttcagattttcttattttttaaatttatattgtactaagctacatataacacaatttgccattttaactattttaagtgtataattccatgacattaactatattcacaatgttagacaaccatcgcctgatcatcaaagttttttgatcaccctgagtatgctacatgcgattgttttttgttttaatgagttaaaataaaaatcctgagcagacaggtgtgtgtgctcatatttttattttacctaagccggaacccttggtcttacttctcgactgttttaccggctgctacttttgttcattattacttctttttttcactctaatcctgtgataggttaatgtttatattacttgtcatctcttgcctgcagtgttctaaattgcctccccactctgttctccattgccagtcaccgttctctcacctccccactccatctctccatgcttgctaatcttcctgcaactgaggctcgatcccatcactctttaagattttaagtggcccctcattactaacaatccaagccactatgagcagcattgtttcttagaatggtatttttacttttatttttattttgagacatggtctcactctgttacccaggctggagtgtagtagtacaattacggctcactgcagtcttgaaatcttgggctcaagaaatcctcctgtctcagactcccgagtagctgggactacaggcaagtgccaccacacttgggtaattatttattattattattattatttttgtagagaaggagtcccactatgttgcccaggctgtccttgaactcctgggctcaagcaattctcccacctcagcctcccaaagtgctgggatttcagctgtgagccacagcacccagccctgagaatggtttttttaaactttcttgtgtctgtgccttgcacagtgcctggcacataataggtgctaaaaaaaaattggggtgaatgattcttggtttgggatcctggagtaaacattcataaaacccatttcatccttgtacaagtacgggaatactagtcgctataacagatcaactccctaacatgatagtttccttcttgtccatggcacactccaatgcaagtgttcttgttggactcattttttctaagcaatagttaggagctcagattctttcaatctttggtgctatatctttaacatggggtttccaagattaccttggaagacatttcaattttggccagccagaaaaggaaaagaacacagaggatcacccctggaagatttttgttaagtccaaccaaaaactgatgtacattgtgtctgcccacattttaatagccagaattaagccacatggccacactgaactatgtgagggaggctgggaaatgtagttcagctatgtgcccagaaagaagaggaagtggattttgttaagtgcaacagtctatgccagagtcctttgacactaattcagacctattcagataagttcttagtgcagttctttctcgatatggactgaattgtgtcctccccaaattcatatatgttgaggcctaaccccaatgtgatggtatttggagttaccttgaggggcacgtatttaggattagatgaggtcactagggcagagcccttacaatgggatgaatgcccttataagaagagaatgctggagaactggccagcatttccccatgcgcacgcatgcgtgcacacacactcacactcacacacaaagaggtcatctgagcacacagcaaagtggtggccacctacaagagaagaggcctcagcatgacacctactttgtctgcaccttgatcttggactttaagcctccagaactgtgaaaaatttgtttctgttatttaagccacccattctatggtattttcttttccttaaaaaaatttttcccctaacccactgtgccttataatattttttatttttttattttttttcatatgatattttgttgtggaagcctaagcaggctaatatactcctccctgactaaaattctgcaatgacaagtaagatgaatccaaatcaacattttttccctctagacttctctcagctggcgccaccagagtttatgccatcttgactcatggaatcttctccggtcctgctatttctcgcatcaacaacgcatgctttgaggcagtagtagtcaccaataccatacctcaggaggacaagatgaagcattgctccaaaatacaggtgaggatgagatttgtgcaaaacaagacttttctaagtgtttaggaggtggttacttacrttgaattaggtctctggattctgaagatatctttctttggtctgaaggatttagtcttgtcatcagaatttgtgatccaaaagttaacaatcacctgtttcttttcctttttttttttcttttcaaactgccaagccttgggaaaatcacctgtttaaaagtttaaattgctacacctcagaatctctggaagatggagcctaagattctacattttaacaggttctcccagtgattctgatgcaaattaaagttttcaagtccatactttacagtatgtgtttgtctgttaactatcggcccctgtagatataatgtgaaacctttaaactgattgtacacttctaccaactttagtgtttctcagtgtgctctggacctaaggttcttattaaaatgtagattcctttgctccatctaagacctataaaaccagaggtcctggaaccagtattttaaagtaattccccaagtaattgttagaaactaaagtttgagtgctcttgcactaaaagaacaaggccttgcttaattaaaaatgttcacattaatctatgagctttttgaaattaatatgtgtaattggaggattatcatcttttttttttttttttttgagataggatcttgctctgttgccccagccggagtgcgcaatcaaagctcactgcagcctcaactttgaaggctcaggcaatcatcctgtctcagcctcccaagtggctggcgtgcaccaccatgcccagctaatttttttgatattatgtgtagagacggggtctccctatgttgcccaggctggtctcaaactcctagcctcaagctatcctcctgtgtcagcctcccaaagtgctgagattacaggtgatgtcattcttaaggattttttttcaacttagtcttttttttttccttcataaggtttttttgtttgtttgttttttgtttttgagatggagttttgctcttgttgcctaggctggagtgcaatggcacgatctcagctcaccgcaacctcagcctcccaggttcaagtgagtctcctgcctcagcctcccaagtagctgggattacaggcatgtgccaccacgcctgactaattttttatttttagtagagatggggtttctccatgttgctcaggctggtcttgaactcctgacctcaggtgatccgtccacctcggcctcccaaactgctgggattacaggcatgagccaccacgcccagcctattcagaaggatttttaaatgcgaacctaccaccatttttttttagacagggtctcactctgttgcctaagctggagtgcagtggcctgatcttgactcactgcagcctcaaactcccaggctcaagcgatcctcctgccttagcctcacaagtagctgggactacaggcatacaccacaaccacgcctggctaatttttgttttattgtagagacagagtttcaccatattgcccaggctggactcaaactcctgggctcaagtgatcctcccaccttggcctcccaaagtgctgggattacaggtgtgagccacagtgcccagccattttgatgaaccaaagtcagcgttttttctcagttagcattttgactctttcctaagtggctgttttgttttgttttgttgttttgagacagagtctcgctctgtcacccaggctggagtgcagtggcacgatcttggctcaccgcaacctccacctcccaggttcaagcaattctcatgcctcagcctcccgagtagctgggattacaggcgtgtgccacaccatgcttggttaatttttgtatttttagtagagacggggtttcatcatgttggccagcctggtctccaactcctggcctcaagtgatctgcccaccttggcctcccaaagtgcagggattaacaggtgtgagccaccgtgcccagccgtaagtggctatcttaaaaatgttatgaagaatagctgagtgcagcctcatgacagggaaacagcacagtgttgcagttttaagaggaagggcacttgcctggctgctcatcagtgtctgcaaattggccagtcatctctgaccatatgatagtaacctgatttcctttcttgcctttctaggtgattgacatctctatgatccttgcagaagccatcaggagaactcacaatggagaatccgtttcttacctattcagccatgtccctttataatagagtaacttctgaggctttttgagaataaaatccaccccacccttgtttccccttggtatttgatgacaaattcagcagaagacccggcttgctccagtgtagctttctacatcccacatcaggtatattagagsttatccgaactggggaaagacggattgagattaactgctgggacctcctacctgcattatctcattctggcttccttgataattctgtgggccttgcagctttaactatagctcagctgctgcaagatttcagacttttgaggatgttgtgtgagggtgtttgactgtgactggggaagctcagactactttgtatgtgaatgcttcagggttttctttgttgagaacaactagcaacaaaggcaacccatgtgtgaccagttctccccaaggtctatgctaaattatagcaagagccctgggcaaccccaaacctagtcctggtagctgagcaccctgtaaggcaggagcaggcagctcagcttgagcagacattgggtggggggtggggggtggttgaggggggaggcagcacagtgcagcaaatgtttcttgggaggaagaagcctgatccatcacctctgcttgactatgtagcttggattctcctttgtannnnnnnnnnnnnnnnnnnntcgatttggctttaccttcatctatcttgatcctttcctggccaaatatcctcttgggcccaaatgaacattgtaccatagtcttctggaaagcaaacatgcttcctgctatgtaattgctaacattcatattagatgatgtgctgtagcttgatcttccttagcctactgccactgaggcagtaggttttaggtggtatcgtagtgccttttgattaatttaagtatttaattttcatcttccttctttggatctatttggcctctcaaatgaactgrgattcctgttaaaaaagattgatgttattgtctcttgtagaggaaactaataaagtgtgtgtacctgtgtgatttggggtctgtatcatacataatctgtactgatctctctgctaaaggtttggtttagatagatgtcttgctgtccattgatagctcttatttgtttccaaactacgttagcttcattgttaaaccaagagaagacattggcagcagttttattcaactgtaagactaagatgtctggagtttactgagaatgtgataagagtgtaattctgtgcagtatacctaaattatagcatgtataatgtctggtggatctctggttcttactcctgaagatccaaattaggtattttcttatgggaggagaatttctgtgatttattcattttgaactaattttgccaaatgtgataatttccttccattcatcagtaattgacatacgtttggcatttactttctttgttttttttgattttttggtttttttttgagatggagtttcgctcttgttgcccaggctggagtgcaatggtgcaatcttggctcactgcaacctccgcctcccgggttcaagcaattctcctgctcagcctcctgagtagctagaatttataggcatgtgccaccatgcccagctaattttatatttttagtagagacagggtttcaccatgttggtcaggctggtcttgaactcctgacctcaggtgatctgcccgcctcagcctcccaaagtgctgggattacaggtgtgagccactggtgcccggctgggcatttactttcatccctgctaaataagaactattttgagaaggtaaatgtgcaaaatttaaggatgaattattatgcattccaaaattttaagtttccttctttctttccttttttttctctttctttctttccctttagctctctctttcttcatttctttcttttctttccttccttctctttctctctctgtctgtctgtctgtctttctttctgtctttcatctttctcttgctctgtcacccaggctggagtgcagtggctcgatcttggctcactgcaacctccacctcctggattcaagtgattctcctgcctcagcctcgagagggattacaggttatctgggattacaggtgtgcaccatcacacctagctaatttttgtatttttagtagagacagggttttgccatgttgctcagtctggtctcaaactcctggcctcaagtgatccgcccaccttggcctcacagagtgctcggattacaggcatgagccaccatggcggccttaagtgagtgagtttcttggcccatcatcaaataagggtgctcttttactttgggaagctacatggctacagagcttcatgaagagtgcttccttatttgtgaagcccaggtctacttttgtttattttgtttttgcttttgttggatatcgggatatctattttacagctagctctttgataaaagtgattcaggagggactaaagtatactatgaaatgtgcgcctctaaccctctagacctctttaatctcagatttttgctctgggagaagctgatgtgaagcaccaatgccttcacttgctcatcatgctatttcctaaagtattggatcagtgggtcaggtctcattgttacagaatattttgacattaagatctctcttgtgggcccctttgggtaattcatttcctaggatgaggttttgagattattcaaaaaaggcccagtccccaactttgatccctttcaaagcagttgttttttgtttttgttgtttttgttttttgagacagagcatcgctctgttgctcaggctggagtgcagtggcacgatctcggcttactgcaacctccgcctcccggattcatgtgattttcctgcctcagcctcccaagtagctggctaatttttgtatttttagtagagatggtgttttaccatgttgtccaggctggtctcggactctcgacctcaggtgatccacccgcctcagcctcccaaagtgctgggattacaggcatgagccacggtgcctagcctcaaagcagttcttgactgtggggaatagtagcaggagcagacctgccagggcatgaggaggaggcagcaccaaagctaagtggagttgcagcgagcacagttgacaagaaactctagttgtgatagctacatgattgcccttgaacacctgtctgaagaatggaggtacagactaaagcaggggtaggaggctggctctgtttcctgacctaatgtaatggctgcttttcacacacagaatgtgtttactcaacatctctatgagtggtggtccccagggcagtaatgcaaagcttcctcccctcagcctcacttcaagttttttgtaaggtaggtgcctccaataaccagattccctttaagaggcctctttgttctcccccacaactgagaactagtaaggatgagatggcaggagggcatggcaataggaaaatgatgcttttctgggatttcaggctttttatgattttaatgccttcaggttgttaagggctacatgcgattagtatacaagttaacactttcagcagaaaacacttggtatccaaatctggaaagaagaccaggactagcagccccaacttagatgaaaaaaatcttttatagaggcaccaacttacagagttgctgagcttcttctctggtcctgagaatgcagggaggtgagggggtatgacatagaatggatgctgctgtttgaaacaagtggcttctgtcttggcagtggtggtttaaaaagcaagagtgctacagccagagattccccctctgctttgcctccactgtgtttggagacttgtttttctcttgcagatttttttttttttttttttttttttaccactctgagactccttgtttaagaataaagcaaattgtgctccaaattatggcagataaagcttgatactctgtaaaatcttggctcgagcatttctttttgtgtttataacatttacttgactctttacaactcttcaactgctatttgttgctataaagttttaaagtttgggtttaagacagagtctcactttagcccaggctggagtgcagtggtgcaacctcggctcgctgcaacctccgcctcccaggttcaagtgattctcgtgcctcagccttctaagaagctgggattacaggtgcccgccgccacacctggctaatttttgtatttttagtagagatggggattcaccatgttggtcaggctcgtcttgaactcctgacctcaagtgatccacctgcctcagcctcccaaagtgctgggattacaggcgtgagccaccgtgcccgtcctataaagttattttttannnnnnnnnnnnnnnnnnnnnnnnnnnnnnnnnnnnnnnnnnnnnnnnnnnnnnnnnnnnnnnnnnnnnnnnnnnctgtaatcccagcactttgggaggctgaggcaggaatgagcctgagactcagaaacctgcccatgtgggtgtggctcctccttccctagtcctcactgctcatgggctactgtatgcccactccttggtctactgtccccccaccccgtgccctaaggaaaaccagagactctccactgacagtcagacttctctccccatccttcccctttcctgagcttttcttccccaatatattcattcctccaatagctcagctgccaactataaaaaataaggggaagctcattttgaagcaaaaatagctgaaactgtacagggtgacaataggccttattccctcagccccattgtgttttttgttgttgttttctgactggctcaagattttatcttcttagccaagtccccacccctcccccctctggcgtgtccactaactgctgcggctgggttcttgttgcttcacccatagagttgccatgagctcactcatggtgtggctctgattcagggtttgaatataaaacaaaacaggccagccaggtctgaccaatccattcctcctgggtaatatgctgagcagagattttcccgcttgtaagcagcctggagccacacagcccaattttagtcatcgccctcaaagttcttggggtagagcctctaatgataacaatgggcggggactttgtggtgtgggaggggctgcagtgaggcagagaaggagcacggtgacgggcgggcttccctggctaaagcctcatcccagctttccctaggactggctgcacagctgcctcctggctgaggacaccccctccccctccacgcgcacacactcgcttcctttcctgccgccgccacctggttcacagggcctgtcactgctgtccatctgccactagggggcgcctagcagagaggatggagggaaggggcacccagggcaacaggactgggggctccagcagtggaaggagtggcagcagtggaaggagtggcacctgtcggtcctcctggccccctcttcccctgtatgtcctccgcaaccacgggacaacaccgtgcccagtccacactcattcagcagacaggaatgtgtgcacgccctaagggcatagctcagtgcattttcacacaccaagcactgtgctagacgctaggaatgcagaagcggcctaacgtggtccttgacgctgagatgcacttgatgtagaggaagaaacagatagggaaatgggtaattacaatgtggtgtgataagtactatgatgagggaagaacaaaatgctatgggagtgtgggggttgcgggggggcacccaagccagccttgggagtcaggaaagacttcctggagaaaaatactttgacttttgaagtagttgactggaagttggccaaagagcgagtgaagagaagggtgtttcaggcaggcagaatagcacgtttacctggacaccccaaaggaagtggcgtgtgtgtgtgtgtgggggtgtgtgtgtgtgtggggggggtgtgtgtgtgtgtattttcgggtaggatgaagagctgtgatgaggggtgggctggtgagactagatcataagggactgtataaggagagtgtacatatgtctattgtccctgcatacttattaccagcaacccccttcactctcaaaagggtcctgattttggtagtaaattatacaggaaccctaattgtaagacacactagggagtttgaattttatcctaggagtgaagaggagccattgagcattttaaacagggcatcaacaggatgagattttgattttaaaatagactggcagtaatgtgaagaatgggttgggaaggggcaaatgtagaggaaggagtttggttaggaagctgtgcgttgcccaagtgggagaggaaggtggctgaggtgagaaaagtgctggtgggacagaagaacaatttacaatatattttggaggaaaattcaacagaagttggtgatatttcaatgtagggattggaagagagggaggagtcaaggacaacttacatttttctggcctgagtgactgatggatgctggtactgagcagcacaggagatgaggctgaagtttaggaactgctaagtttaaggtgcctgagggacctcaccaggaggactgaacaggcagccattgtagctagtagaggttttgatcatcaatacatttttgcccaaatgccatcttcagatagtcaagaagctgaagcaacggggctgtaaactaggccagccttaaatatcctgggtgtttgtcttaagaggacaaggacacagtgggagaggttatggaatggaaggaaagctagggaacagtgaagaaattaagtgtattaaatgcagaagatataaatttgggttatgagatatctaaaggagaaaaatagaagccaacaaagaaggctctagtgcctgtaatcccagctacttgggaggctaagatggaaggattgcttgagcccaggagttcaaatctagcctgggcaacacaatgagaccatgtctccttctttaaaaaaagactctaaactttagagtctaaaggaaaaaaaaatgggtcttttaacaattatagatatt

SEQ ID NO: 94969 - DNA, 17621 bp, Homo sapiens
agacggtgtctctgtagtgtaggctggagtacagtggcaccatcatagttcactgcagcctcaacctcctgggctcaagtgatcctccagccttagcctcctgagcagctgggactacagatgtgctccaccacacctggctaacttgtttacctttttaggggtgggggttcactctgttacccaaactggtcttgaactcctgtcctcaagcgatcctcccgccatactgtccggtgtgtctctgggattacaggcatgagccaccatgcctgactcaattatgtcttttaactctctaaaggaccctacgggacagggatcatttattaatccattttttcagataaggaaactaaggctcagagatgagaattgacttccacaggaggctccaataaatggccaaactttgtgcagtttgcatttagcaatgcaaatgctaaatgctaaaatgaatttagcctactgcaaagcctactgcactgctttctggctagtaatgagtgtgatatgttctcacaggcatgaagcccaaagctcagaggggcaaggccatagctcagtgtccccatccccaatggtggtggcagaggtggctcctcagaagcaagaggagtcctgccagatgccacagacctagaccttaaggtgctggcgtgtggccaggaggctggatttggacccatgagctcatctgtgtcaacaggccgggtgtggtggttcacaccagtaatcccagcactttgggaagccgaggcaggaggatcatttgaggccaggagttcaagactagtctgggcaacacagtgagacaccgtctcccacacacacaaaaaaattttgagacggagtctcgttctgtcgcccaggctggagtgcagtggtgcgatctcagctcactgcaacctccgcctcccaggttcaagtgattctcctgccacagcctccctcccgagtagctcggactacaggcacgtgccaccatgcccggctaattttttgtatttttagtacagacagggtttcaccgtgttggccaggatggtcttgatatcctcagctcatgatctgtgctgggattacaggcgtaagccaccgtgcctggccacaaaaaaatttttttaaagactaaacactccaatcgtatgcccacatccagcacccacatctagaaaaaaaaataaaagcccccccgtcctgcttctctaccccagagaaaccacacatgagcaatgcacaccctgtctctttattaaagcactttcattcctggtggtatccttgctggctgaggctggagggtcctgtgatgaatccagaacactttgaaggcttcgggatgatgctgctcatgaccaggaggtccccacaaacggaagtggttaacgagtggcaaaagagtagttttgaggcatgttctagggacaaaaagggggaggcatgagaagccaagagcatcaaagaggggtgggctcatcttccaaactgactgttaggaagagctccataaaagagacagagccttttcactctttagacccaaggctcatgtcttttttatttttctcgagacaggtctccctctgtcagccaggctagagtgcagtggtgtaatcatatcttcctgcagcctcaacctgggctccaatgatcctcccacctcagcctcccgagtagctgggaccacagctgtgcaccaccatacccggctaattttttaaacctcttgatagcaggaactctgtttcgttcactgcaacaccccagcccctcgagcagtgctggcacatagtaagtgcttaatttttatttatttaattttttggagacagagtctcgatctgtggcccaggctggagtgcagtggtgcaatctcagctcactgcaacctccacctcccgggttcaatcaagtctctgcctcagcttctcaagtagctgggattacaggtgcgtgacacaatgcctggcttttttttttttttttttttttgagaaagagtcttgctctgcagcccaggctggagtgcagtggtgtgatctcggctcactgcaacctccaactcctgggttcaagcgattctcctgcctcagcctcctgagtagctgggattagaggtgcataccaccaacccagctaatttttgtatttttagtagagacagggtttccccatgttggccaggctggtctcaaactcctgacctcaggtgatctgcccgcctgggcctcccaaagtgctgagattacaggtgtgagccaccgcgcctgacctaacgtttgtatttttagttaagacaaggtttcactatgttggccaggctgatcttgaactcctgacctcatgatccacccgccttggcctcccaaagtgctgggattacaggtatgagccaccgcacccagctcctcctactatttctttctttcttttcttttttttaaatttttctttttgagacagggtcttgcactgtcactcaggctggaatgcggtggcatgaacatggttcactgcagcctcaacctcctaggctcaagtgatcctctggcctccgcctctcaagtagctgagaccacaggttcgtgccaccacacctggctaatttttttaactttttatagagatggggtctctctatgttgcccaggctattcttgaactcctgggctcaagcgatcctcccacctcccaagtaactgggatcacaggcacatgccatcatgcctggggtatcaccatgttgcccaggctggtctcaaactcctggacgcaagcgatcctcctgcttcagcttcccaaagtgctgggattacaggcataagcgaccacacccagccaggaaagtgtgtaaggctctaaacaaggcacataaagtctcttgagtcccctcttaccttgcctgtagactccagctgctaaactgcttctccctgccctaaatacacacagatgctcacactggctctgcgaagactgctctttgcctttgttcatgcaaccccaactgcttgaaagactcctactaacctctttttttttttaacctggaaaattatttctttttttttttgagatggtctcactgtcgcccaggctggagtgcagtggtatgatctcagctcactgcaacctctgtcaccatgttgaccaggctggtctcaaactcctgccctgaagtgatcagcccacctcagcctcccaaaaatgctgggattacaggtgtgagccactgcacctggtggaaaattatttctttaggtgctacctccttcaagaagctccaaagcctgtaatcccaaaactatgggaggccaaggagggcggatcatgaggtcaggagatcaagaccatcctggctaacacggtgaaaccccgtctctactaaaaatacaaaaaaattagtcgggtgtggtggcgggtgcctgtagtcccagctacttgggaggctgaggcaggagaatggcgtgaacccaggaggtggagcttgcagtgagctgagatcacaccactgcactccagcctgggcaacagagcaagactccgtctcaaaaaaaaaaagaagaagctccatggctcctgtccttcctgtccaattgaagctgggataagagtactatcccactgtgtccatttctattatggaaacttatccagactgtattataattggccatttccttgtctgtccccacactgaactgtgaactcttcaagggctgagactgtaccattcatttcagtgtcccaagctcctaagacagggaccaacatatagtgcaaactcaaaaggtttggttaatatcgaatagccttggcagccatggaccctgcatgtaccttttcaccaggagttggcaggaggtatgccttgctgcaggtacggtttctgtccgagcaggagatggtggaagagaggggagagggctgagaattcagaatttgaggatcagggcagaatagaatggaagtgcacggttcaaaaattcccccaccctgctgggatattgtgaaaccctcactctctcccctccaggttcctcacctctctcccaggacaaagagcatctcccttgaagcctcactcaccaggtgtctgtgcctcaggtcttggtgaagaatgctggaagtagaggacctagtcagagaaaggactatccccgtggccagaagagatgcggccagggcagacggggctaaggggattctcggccagcagtgaggagtgggtactgggttagcgggtgagaggggcatttcacaggtcctagggctggctgtgagatggatgagatgggcacagactcctggagagttcagctaggggtgggaggggtcagggactgtaaccaggcatagtgggggcagcggttctctagacacggtggtcctgaggcagggggttaccgcgtttggatatctgagtcgcttggtcttgtgactgcttttttttgatgggcacagggttcaagtggcagcaagcagtgcacaaagcctcctccatgagttctgcactgatctgggacaggtattcctcagaacgagataacgaagcctgggaaaggaaaagccggaggggttcagcctgggagctcccacatgggagtgctggctgtgggagttcccaggctggggcctgtgggtccaaggagcttgctcctgaaggactgggccttgagatttagctagaaagctctggacctgggggaggggggtttggtgggggtttagagtcagggcctagtgctgagagctatgagtcggggcttcaggactcagggttgaggctagagtctcagggcccgtggctcagacctggcacggggtgcctctgcctgggaggctttcacttcattacattcccacctctagggttccctgcagtgctcaccggacctcctctcaaggagggtgcagcttgagatggccagctgctcttcttctccccctcattccccatcggagtggacgccatccccctgggaacagtcgaagcctgagttgacctgagaaaccagcccgctttcccccagaacccagtccaccaccattccccgggcccaggtttaaacaaggcctttagaggaaacatcccgctgcctcattccctctcacaagaaaaaataataataataataaaggttgctttatatcttcgggagtgagagggaactcccgcaaccccctacccctcaccccttcgcctggtgggcctctccttccttcttccctcccaagcaccttcccaagccgaggcagccgacttgacgccccagacctggcagatgggtggaaaccttgggctactcggcaaaaggagagacgtggaggcctaaggacctctggtataggtcgtgggggatggagaatgggagatggggaggaaggctggaaaagggggagccggctccgtgtcgctaccggacgctataaaacccttggagtctgcagaggttccgcagcctcgttgctaggagatcaggggttctagaactaaagacagaggaatttcctagcgcgccccgtttgctcctccagcctcccctccgtacccctccaggtgcctccttgagggcagtgaccccaagcgccagacgcttgagaagcttgggaggatgacgtagggtggagcctgcgacctaatcctcccatcacaaggggcacgcgaraagcaacccatctgcagggcgctctggagcctctctagccgcctagagcctgcgagagcaaaggcggctggagacttagggggcggggagtaaagtgaggactgcaccaaatctcctggcctcttggggacgcaaagactcaggaggaggaattttatcgccttatctttgcctccaggaagtcataccctccacaaaaggaaagcagagatttttattcggtcttctcttttaccctttccttttccgtttctaactttgcttgacgttaatggttccttcctccctctcctcctctgcgctttggtacgagccaagggagaggggcggagggaggaaaagggaaaggaagccgacaggccttaaaggggccgcaactatttttttaagccactttttcctctctccaattttgcaacgacgggcgcggaggaggaggttcccggaagccacgcgcagctggagcagcggcgaccgcagctggaggcccggagcgcctgcggggctggcagaggcgagggaggttgcgggtaggaagggcggactgcgcgcgccccctgcgtcccgcgcacctcggggccggtccatgctcccgacggctgcgggcttcagcatctggggccaggttggggcggcggggtccagggcgcaggtggtgcggccgatgcgccgggccggaggctgaggccgcgctgcggggctgggacagcactggcatctccagagcaggcccggggcagcaagggaggcgccgcgatgccagacgaaaatatcttcctgttcgtgcccaacctcatcggtgagtgctgcccacggccccgggccgaacgagagggcgaggggccttggcgggctccctgatcctgccctgtctccccgcgtcccgttccaaggttatgcccggattgtcttcgccatcatttctttctacttcatgccctgctgccccctcacggcctcctccttctacctgctcagcggcctgctggacgctttcgatggacacgctgctcgcgctcttaatcaaggtgacagacacccctctcagccagccttggggttcaacaatcccctcctcccttcccctgcctcctcgggacctcagagtcagagggctgtcattcccatctctggaaaaagcagaacaggatggcctggggctttttgttttgtgttttgtttttttgtttttgagacagggtctcgctctgtcacttaggctggagtgcagtggcgcgatcatggctcactgcagcccccatcttctgggctcaagtaatcctcccacctcagcctcctgactagctgggactacaggagcgtgccaccacacccggctaatttttaaatttttgtagagactgggtcttgcagtgtcgcccagattggtccccagctcctagcctcaagcgatcctcctgccttgctcccaaagtgccgcgcccagcaagaatggactgattttgtagcaaaaggaatttaagctagctcttgagaactcactgcttgtgagaggtgtggattagcaagacatgacatggcggtggcgctgctggaggtctctctgaatacaagtccattcaggccaggggcggtggctcacgcctgtaatcccagcactttgggaggccgaggtgggtggatcacgagttcaggagttcgagaccagcctggccaacatggtgaaaccctgtctctactaaaaatacaaaaattagcgggcttggtgacgcgtgcctgtaatcccagctactcgggaggctaaggcaggagaattgcttgaacccgggaggcggaggttgcagtgagccaagattgcgccattgcactccagcctgggcgacagagcaagactctgtctcggaaaaaaaaaaacaaaaaacaaaaaacagtgtattcaacaggtgtttactggaggcctactgtgtgccctgcataagcagttggggttccagaaggcatgcttagagggaggatggagagggaagggtgatggcttctggagggttgactaattttttaatctgttctccagacccaactgtaaggcttcccctgaggcatcaagtctctatctagccctggagtcttggttctggggttgatgagttgcagacatagctttcctctcctcctaccctgttccctccactctcatgcctttctcagttcatgccatggtgacctttgcccactgacctcacacacagcctgttttctagcctgcgttcctccccaggcaggcggacacttccagtcttcgtttacaccctgcgtcagagtgataaaccaaatatgggcacctgtcctgcatccactgtgccataacagcccttgcccacctaatcttccaggaacccggtttggggycatgctggacatgctgacggaccgctgctccaccatgtgcctgttggtcaacctggccctgctgtaccctggagccacgctgttcttccaaatcagcatgagtttggatgtggccagtcactggctgcacctccacaggtctgctgcgattctgggggcctgggccacttggagacattacagtggggtgggctgagcctagayggaagggtgtctgggatggcactaggcatcctggaagggctcctttttagctctgctttgtagaaagaccccaggcaaacctgcctctctttaaagcttcagtcatgtttacagttgcattaagcaattcttaggactcttctggctgggtattctaggattccatataggtgacagcttataggaaggggcatgggagctttcaaatgtggcatttgaatcctgactctgcccccaaataggtaactgtggctttcggcaggatactggtccttagccgtgcccagttttccatctgtacaataggtgttaacatgaggattggatgcatggtagtggtcatgaaaccttgtgggttcccctgttttctccccaagttctgtggtccgaggcagtgagagtcacaagatgatcgacttgtccgggaatccggtgcttcggatctactacacctcgagggtaagcatttcctgcacaccccacccctcaggctcttggctgtgggaagccctgggctgaatcctggtcctagcctaggagaaggcgagggcgcagagcagggcctgcccagtcactccaggaggagggcccgtaagctgaggcgtggaggaggaggattggtggggaaggyctgtgtgaattactccagggaacaagtgggaatgaggcctgcaaagagaagggactgaaagcgggaagggagataagccagagaggtctgcagggctggagtgtggacttgattccaggaacacaggcagcctctggaaggatttttaaaaagataatggctgggcatggtggctcatgcctgtaatcccagcgctttgggaggctgaggtgggaggattgcttgaggccaggagtttgagaccagcctgggcaacaaagtgagactctgtttccacacacacacaaaatcttgaattagcttagccaggcacagtggtacacgcctgtagtctctacttaggaggctaaggtggaaggattgcgtgagaccaagggtttatttatttatttatttatttttttgagacagagtcctgctctgtcacccaggctggagttcagtggcgggttatcggctcactgcaacctctgcctgctgggttcaagcgattcttgtgcctcagcctcctgagtggctgggactaccggcacgtgccaccacactcggctaatttttgtattgttagtagagaggggtttcgccacgttggccaggctggtcccaaactcctgacctcaggtgatccgcctgtctcagcctcccaaagtgctgggactccaggcatgagccacacgcctggctgagaccaggagttttgaggctgcagtgctatgatcatactactgcattccaacctggatgagagagcgagaccctgtctgtaaaaaagaaaaaaaaataagagaagtaatatgccgagattgtgccttcattagtgctgggggggcagggggtggcacacgcctgcctcttgctaacgtggcctgtttgctgtgtgtgcagcctgctctgttcaccttgtgtgctgggaatgagctcttctactgcctcctctacctgttccatttctctgagggacctttaggtaggagatgaggggctgggcagraggatgggagggggatctggcctgcccagggagatggaggccccctccttcgggccccaaactcccctgctgccttcctgcagttggctctgtgggactgttccggatgggcctctgggtcactgcccccatcgccttgctgaagtcgctcatyagcgtcatccacctgatcacggccgccygcaacatggctgccctggacgcagcagaccgcgccaagaagaagtgacgctggagccccgggtcctggctgcccacctgccctgggagtcttgctgtgccacacagctccycaccccctgctaggaggtcccagtctcacgccttcctcatgtgttgttctacctgctgggatgggggtcagcctctctttggtgacgtcacgttctctgggatcctgaggacccgggcctcaaatcagggaggatacgcgggaggccccctccatccaggcggtgctcctggggtgccgggaccgggcagtgtcacaccctgcctgctcagtcctggggtccgagatgctagggacgcttgagtgagggaggtggtgtgagggccaggtttcctgaaaggcgggagtcagacctccgcccccagccagagcaagcttggggcaccatgcccaggagggaagaagccatccacagccttccctgtcaccggctcctctgtcctgcctaccctggtcctggcgggacttcactatttgacttggtttcctttcagatattcttggctcagggcctgggttgagggagcttagggraggacgtccgtctgggtgcttttcctccagtttgctggctggcttctccgtctacccacagtgacctcacagagaggccctcctgccacccatgctcatgtggtgtccccaccgcccacttgtttgatgtcactgactgtctacatgtatttatattcttgatattttctaccctcactagaatgtaractccatgaaggcacakacttttcttgttctcttcystatccctagagtaagaccaacttgaacctggcatatagtagctgcttaataaatactcgtctgtcaatgagttggtttctcagagtgtggtccttagaccacctgtggtatatttctatttctcttttttgcttttctttctttttttttttttttttttttagagacagagtcctactctgtcgtccaagctggagtgcagtggtgcaatcatagctcactgcagccccaaactcctgacctcaagtgatcctcccaccytagcctctcaaagtgctgggattacaggcatgagccacaaagcctggctggatatttctttaaaatgcaaattcaagccaggtgtggtggctcatgcctgtaatcccagcattttggaaggccaaggttgggtggatttagtacaggagttcgaggccagcctgaccaacatggtgaaaccccatctctacaaaaaataacaaaaatagccaaatgtggtggcacatgcctgtggtcccagctactcaggaggctgaggtgggaggatggcttgagcctgggaggcaggagggagaggttgcagtgatccrtaatggtgccactccagcctgggaggcagagccaggcagtctcaaaaaaaaaaaaaagcaactttggcccgtcttggaggctcacgcctggcctgtaatcccagcactttgggaggctgaggtgggaagatcacttgagtccaggagttcaagaccagcctgggtcacatggcaggaccccgtctctacaaaaaaaaaaatacaaaaattagccaagtgtggtggtgtgtgccttagtcccagctactggggaggctgcagtgaaaggattgaatgagcctgggaagtcaaggctgcagtgagtcatgatcatgctactgtactccggcctggacgacaaaacaagatgtctcaaaaaataaaataaatgcaacttcttggaccctgcagccaaccttcagagttagaagctctagggatgggctcagaaacctgcaacttgaatgccggggaattcttccagtaatgttgagaaacactgttccctctttttatgggctcctatcatatactaggcactgttctgggcatctatcccctgccatctgtggtttttaaactactgtaccgcatgccagactctgtgctgcgggttctttgcagatgttactcattctatctgcatgatagcttagccaagtggcccaagaggcccccgtgtccaggagagcagaaatttaccagacatgtactgagcctcaactcctgtgctaggcccaggggattcactgggtactgggcagctggcttcctctacaataacataggaaagtgctcgttgggggtgggagtagaagacacctaggacctgatttagggtttggtgaaggggctgggtatcccatgtagaaggctggtagggattggagaggaaagggttagtgcagaggagattggttcttagctgagggaatggcatgggaaggcagggaggccagagaggcccctgggctctgcacctctttctccttcctgtcagctcttcttccggcatggtgggtcctctgagcactctccagccccagagcacggagcccttggtcggcctgggtcccacatccctgactggctcctgggctccttggttctaaccatttacagtgacaacagaaattggaacagatctaggccgggcacagtggctcacacctgtaatcccagaactctgggatccacccaagggggtggatcatttgaggtcaggagttaaagactagcctggccaacatggtgaaaccccatctctacaaaaaatacaaaaattagccaggtgtggtggtgcacgcctgtagtcccagctacgcaggaagctgaggtgggagaattgcttgaacccaggaggtggaggttgcagtaagccaagatcatgccactgtactctagcccagtgacagagcgagactccgtctaaaaaaaaaaaaaaaaaattgtgcacaaagcaggtgtgtttcaagcgcatcaggcacccctaccatccctgccaacctggcctgctccagtcaaggtggggaaaaaaaaaagaaacagatctaggtcacagggcctggagcaccaagtgctccagggaggttgggggagtgggggttgggggctgggagagctggtgagaggcgacgcagaagccagctggggcggcctaggagcccagaggactttttaaaattttactgtggagacagggtctctctctgtcacctgggctggagtgcagtggcatgatcatagctcactgcagcctcgacctctcaggctcaagcagtcctcctgcctcagcctgctgaacagctgggactacaggcatgcaccaccatgcccggctaatttttatgtttttctgtagagatgggggtatcactgtgttgcacaggttggtctcaaactcctggcctcaagtgatcctcctgctttggcttctcaaagcgctagaattacaggtgtgagccactgtgtctagcccatttccatatcttaacattcattttatgtatgtgctgttctgctaacacaagctaccctgctctaagtgctatttgcgtgcattatcttatctcacaattgtacagttgcacacaatacgacagccctgttactgttctcattccccagagaggaaacaggccccgagaggtggcagcctggccagtctggttccagagcctgtacctgaacacttaattgtacgcagtactttcacgccagcgggcttctgaatggttgcatagaacgccaggcgtggtggcaggcgcctgtaatcccagctactcgggaggctgaggcaggaggatcgcttgaacccgggaggcagaggttgcagtgagctgagatcgcaccactgcactccagcctaggtgacagagtgagactctgtctcaaaaaaaaattcagtttaacctggtcctaccactgtgaatggtgctgcggtaaatcatctcgcgctttttgggggacacgtataggatgaacgttgaggggcttaaagcaggacagtggcagggacagacctgtgcttgaagaagctattggtgcacaaaactgaggtgcggtgggtgtggtggctcacgcctgtaatcccagcactttgggaggccaaggtgggcagatcacgaggtcaggagatagagaccaccctggctaacacggtgaaaccctgtctctactaaaaattacctgggtgtggtggcacgcgcctactgtagttccagctactcgggaggctgagacaggaaaatcgcctgaacctgggaggcagaggttgcagtgaaccaagattgtgctactgcactccagcctggcgacagatgagtctccgtctcaaaagaacaaaaaacaaaaaactgaggtgcgtttccagctgtgggcaccccactacctggcctgctgcagtcaaggtaggagactgggtcaggggctgtccctgtgcctgccctgcagccctttctccttcctgttggctcttcctccagcctggtgggtcctctctctccagccccagaggacagagcccttggcctgcctgactcccatgtccctggctggctcctaggctccttggctctaaccatttacagtgacatcagaaggctgactgtgtaaatccagctacattgagttgttttgttttgagacaaggtctcactctgtcacccaggttgcagtgcagtagctccatctcgactcatcacaacatctgcctcctgggctcaagtgatcctccagcctcagcctcttgagtagctgggactacaggcggcaccaccacccccagcacactatttttgtatttttttgtagagatggggtatccttatgttgcccaggttggtcttgaattcctgggctcaagtgatcctcccacctcaacctcccaaagtgctgcaattacaggcatgaaccaccatgcctggccatatgtgattttttttttttttttgagacagaagtttcactctttagcccaggctggagtaaagtggtgcaatctcggctcactacaatctctgcccctggggttcaagcaattctccttcctcagcctcctgagtagctgggattacaggcacccgccaccgcgcccggctaatttagtatttttagtagagatggggtttctccatgttggccaggctggtctcgaactcctgacttcaggtaatccacccgcctcggcctcctaaagtggtgggattgtaggcgtgagccattgcacctggccatatgtgatcttaaaaaagagagttgaggaggagagtgtgagcacgggcagtctaaaagaatctgcacccgagcatcctgaggcttgtagggtagcactgaagactcacaggagggcttctaagtccccttggcctacagggacgtggctcgcagtcagactggtgccggcgttccatgtccagtggctggcctgggctcaggaagaacctgcagagcccttgatctggaggtggggagtggggaaaggctgagctgacctgggccctggagtatctatatttgatctagggaacatagtggagtcacgttatatgtgcagtaatagccttctggaatcagctatatgccttcagaataaatgaatgatcaccacgccactgtgtaagaagtttcatttgtttgttccactcaatgactgcgcctcggagggcaggagatcagtacctgtacatttgctgttcctctaggcagtctcagtcttcaaggctctccttctgtgattaaaaataaccctaactactgtaacaaacttcaagatgtgtagtgcctcaaacatgatagtttatttctagactggttgtggtggcacatgcctgtaatcccagcactttgggaggctgaaacaggaggattacttgaggtcaggagcttgagactagcctgggtaacatagcaagtccccattgctacaaaagagttaaagagttggccaggcgtggtggctcacacctataatcccagcattttgggaggccgaggtgggggatcacctgaggtcaggagttcgagaccagcctggccaacatggtgaaacctcatttctacaaaaaatacaaaaattaactgggtgtggtggtgcacgcctgtagtcccagctactcgggaggctgaggcaggagaatcacttgaaccaggaggcggaagttgcagtgagccgagaccgtgccactgcactccagcctggaggcagagcaagactctgtctcaaaaaaaaaaaaaaaaaagaaagaacattattttatttctaactcatattaaatcttaatcagatgctgccgactgggagacagctctcctgcaagcggcgattcaggaattcgggcatctcctgttctgtgattctgccattttcaacacgtggctcctgggactgcccagcttgtttgcatcatgtaggcagatgatgtgtatggaggttgcaggagccaagtttttatggaaagacaggaaattagcacttattacttccacttccattccattggctacaactcggtcacacggcagtgtctaaggacaagggaagctgggacacagattagttgtgggcgtaagtggaagaggaaactgattcggtaaacagcatcttaccatgctgaatgtgttcgctgttgaaagacacagatttttcttataaagggggtccttcaacacatcaattactttggtattcaaccaaagaaaagccatttgttctagtgctagagaaaaacaggctgtgttgaacttcttcagagatcacactgttctctatgtatgtttttgagacagggtctcactctgttgcccaggctggagtacagtgatgccgtcatagctcactgcagcctcaaattcctgagctcaagtgatcctcctacttcagcctcctgagtagctgggactacaggcacatgccaccacacctagctaatttaatctaaaaacactttttttggattagacataggcctaatttttaagatataaaaaactagggccaggcgctgtggctcatgcctgtaaccccagcactttgggaggccaaggcgggcagatcacctgaggtcaggagttcaagaccagcctggccaacatggtgaaacctcatctctactaaaaatacaaaaattacctgggtgtggcggcaggcacctgtaatcccagctacctgggaggctgaggcaggagaatcgcttgaacccaggaagcagaggttgcagtgagccgggattgtgccattgcactccagcctgggcaacagtagcaaaactctgtctcaaaaaatacaaaaattagccaggcgtggtggcacacgcctgtaattctcgctactcaggaggctgaggtaggagaattgctcgaacctgggaagcagaggttgcagtgagccgagatcatgccactgcactccagcctgggcgacaaagcgagactctgtctaaaaagaaaaaaaaattcaatgtatatttcaggcttctttcagtaaacaggttgcttggggcaaccctaagccccagggatgaaattcaaaatatttaaccaccaagccagagcaagaccctgtctcaaaaaaaaaaaaaaaaaaaatttgaggttaaacctaataattaaaattttaaaaatgtaaagttaaaaaaaaattaatctaatttttttttttttttttttttttggagacagaagctcactgtatttccagcaagtcctgtcttcc

SEQ ID NO: 94970 - DNA, 28524 bp, Homo sapiens
ggatcacgaggtcaggagatcgagaccatcctggctaacacggtgaaaccccgtctctactaaaaatacaaaaaattagccgggcgaggtggcgggcgcctgtagtcctagctactcgggaggctgaggcaggagaatggcgtgaaccccaggaggcggagcctgcagtgagccgagattgcgccactgcactccagcctgggcgacagcgagactccgtctcaaaaaaaaaaaaaaaaaaaaaaaaaaaaagaatactggccaggtgcagtggctcatgcctgtaatctcagcacttttggaggccatggagggtggatcacttgaggtcaggagattgagaccaccctgaccaacgtggtgaaatcccatctctactaaaagtacaaaaaaaaattatctgggcatgatgctgcacacctgtattcccagctccttgggaggctgaggcaggagaattgcttgaacccaagaggcagaggttgcagtgagccgagatttcgacaatgcactccagcctgggtgaaagagcaagactccatctcaaaaaaaaaaaaaaaaaaaaaagaatcctgaccctgacatcacaccatatacaaaaataactcgaaatgtatcataggtttattgtaaaagctaaaactaaaaatatataagtaccagaagaaaatataggagaatagctttgtgccttttgagtagacaatgatttcatagacaaaaagcactaaccataaaaagtaatccaatcgatataaactgaactttactaaaacttcattaaacttctgctcttcaaaagacaccattaaggaaaataaaaagcaaaccagagactaagggaaatatatacagacagtccccagtttaatgatggcatgacttagaatttttcagttttacaatggtgtacaggtgatatgcattcagtagaaattgtatttcaagtacccatacagccattcgatttttcctgttaagtgcagtattcaataaattgaatgaaatgttaagcacttcatttaaaaatagtcttgtgttggatgattttgcctaagtgtaggctaatataagtgttctcagcatgtttaaggtaggctaggctatgatgtttggtaggttaggtgtatttttttttttttttttttttgagacagagttttgctcttcttgcccaggctggagtgcaatggcacgatctcggctcaccacaacctctgcctcccaggttcaagtgattctcctgcctcagcctctggagtagctgggattacaggcatgtgccaccacacccggctaattttgtatttttagtagaggtggggtttctccatgttggtcagactggtctcgaactcctgacctcaggcgatccacccgccttggcctcccaaagtgctgggattgcaggtatgagccactgcacccggccaggttaggtgtattaaatgaattttcaacttaacaatattttgcaattatgatgggattatggagacatgacttcattgtaaactgaggagcatttgtatacagatatgacaaagcttgtatccacaatacgtaaaaaactcttacaactcagtaatgagacaaagaacccaattaaaaaatggacaaggccaggtgtggtggctcacacctggtaatcccagcactttgggaggctggggcaggtggatcacctgaggtcaggagtttgagaccagcctgaccaacatgatgaaaccccatctctactaaaaatgcaaaaatcagccaggcatggtggcacacgcctgtaatcccagctactcgggagactgtgacaagagaatcacctgaacccgggaggaggaggttgcagtgagccaagatggggccattgtactccaacctgggcaacaagagcaaaattttgtctccagggtgggtgggaggtgggcgaggtagggagggaagacaaaaaatttgaacaagtttcagaaaaaagatatataaataactaataagtacatgaaaagatgttcattgcatttaattttaatgcaaattaaaatcacaatgagatactaccacacactcacaagtatgattgtaactaacagggctgacattactaagtactgatgaggttgtataacaattggggctctcttatacacctgatgaaaatgtaaactggtaacaacaatttggcattttcttcagttaaatgtagctgggtgtagtggctcacacctgtaatcccagaactttggggaggccaaggcaggaggatttctcaaacccaggagttcaagaccaacttgggcaatatagtgagaccctgtccctataaaaaataaaatcaattttttaaaaaagagttaaatgtgcatttacctatttgatccagcaatttcactcttgggtatttacccaagaggaagaaaaagagacatgtttacacaaagaattgtatacaaatgttcacagcagctttattcatgaaagcctaaaattggaaataacccaaagtacatcacatcgacagaagaatatacaaatcgtagcatacctatgcaatggaatactattcagcaatgaaaattaaccaccaatacacctaatcatgtagaccgattttatagaaaagctgaagaacagcctggccaacatggtgaaaccccgtctctactaaaaatacaaaaagttgtatagtgagaccctgtctcaaaaaaaaaaaaaggaaaagctgagcaaaagaacacacaaaagtgtgcacaatgcatgattccatttgtatgaagttctataatagtcaaaactaaactatagagacagaaagagcagtatttgcctgggactaggagtaggaggatagctgctaacacacagaattggggggggctggccaggcatggtggctcacacctgtaatcccagcactttgggaggccaaggtgggtggatcacttgaggtcaggagttcgagaccagcctggccaacacggtgaaacctcatctctactaaaagtacaaaaattagctgggcatggtagtgcatctctgtaatcccagctacttcttgcaaggctgagacatgagaatggcttgaacccggggggctgaggctacagtgagccaaggtcaagccactgcactccagcctgggcgatagaggaagaccctgtcttaaaaaaaaacaaaaaaacaaaagaacttttggggtgatgggaattttaaatatcttgactggagtagttacataagtgtatgtatacatttttcaaaattcataaattttcaggtgcaggacagacttaaactgaatagctacatttcatccttgattatctttgacctcacttacaaataattaaccacatgatagtctgtcatatgtcatagttccaagttttcttaaacaaaacagaacatggacgaagcgctcaataggcattctagtagaaaacaaacccaagttttgcaccctcttggctgctgcatgtttacttcctgggagcatgtcctaccatatcagtttcctattgccgcttcatgaaattgccacagacttaatggtataaaacgacacacattgttttatagttctggaggtctgaagtacaaaacaggtctcactaagctgacatcaaggtgtcatcagggtagcatttcttctggaggctctgggggagaatccattccttgccttttccagcttctacaggctttcctcattccttgaatcgtggctccctttgagccagcaagcagaattctgctctcatcctcatatctccatttcgcatcctgactctgactcttctacctccctcttataaggaccctgtgattagactgtgcccacctgcataatccaggattgtcttctcatctcaagatttttaattaacgacaaagacccttttggcacttaagttcatatgtttaacagattccagggatcaggacatggatatcgttgatggctattatcttaccttttttttttttttctttttttttttagacgtagtctcactctgttgcccaggctgcagtgcaatggtgagatctcggctaactgcaaacttccctcctgggttcgagcaattctcatgcctcagccttccgagaagctgggattacagtcacctgccaccacacccagctgacttttatatttttaggagactgggttttgccatgttggccagggtggtcttgaactcctgacctcaggtgatcctcccatctctgcctctcatagtgctgggattacaggcgcgagccactgcgcctggcctaacctacttttattctacaatgattctactcttacctaacttagaaaaacttggtctctgaagggcctttattgatgatgtgggatttctgccccttcttcaaaacactggtctgcccctgtcgaaacacctgctttatctcatggaggctccaggttgactttcataactaagtaaagtcttgtatgtaggattcgggtttcaggttcatggggccttgagattcaaagttcaggagttctagatttgagacactagagggagacttaggccttgaaaaagtgacctcaattctaggagtaagtgctgagactcagaggaatttttggcttgaacttgacccagggttcaggcaacagagagcaatggcatagggaagtatggcatttactttttcaagggggataaaaaagcagaagtggctgggagaggtggctcacgcctgtaatcctagcattttgggaagctgaggcgggtggatcacctgaggtcaggagtttgagaccagcctggccaacatggagaaaccctgtctctactaaaaatataaaaattagcctggtgtggtggtgggtgcctgtaatccctgctacttgggaggctgaggcaggagaatcacttgaacctgggaggcagaggttgcagtgagccgagatcgcgccattgcacttcagcctgggtgacaagagcgaaactctgtctcaaaaaaaaaaaaaaagggcagaagtggacttggccacacacttaatcttagattcaaggatgaagagagcaccaaagacctgtacacaaattagctgactcagaggccaaggtccttctcattttgtatctaatagctcccctcccctctccaacacggatgtaggacagagagcaaaatgagaggaagttggaaataggtgaataacagctgaaagccaaggccacagtgtgctcaccagataacataaaaattttcaagctatagttacagattaagtctctcttaactttatttttcctctcatctctccattaaagaatgatgcatcctaggctaggcacggtggctcatgcctgtaatcccagcactttgggaggacgaggcgggtggatcacctgaggtcaagagttcaaaaacagcctgaccaacatggtgaaaccccgtctctactaaaaatacaaaaaattagccgggcgtggtgttgggcgcctgtaatcccagctactcgggaggctgaggcaggggaatcgcttgaacctgggaggcagaggttgcagtgagccaagattgtgccattgcactccagcctgggcgacaagagcaaaactccgtctcaaagaaaaaaaaaaagaatgatgcatccttgatgcagagtaggagataatgaaaaataaataaataaaacaaaacaaaacaaaaaagaatgatggatccaccttgccttaatctttatttaaagaaagagaaagtttaccaaattcagatgtcattgaagaactttggaatttggtacccagtgatccaccctacaaaattcatgtcatttgcatcataggctttctcatcactaaagatgcaaatccccacgataatgtccctctcagtcggccccctgtttgtacagacagctcagattcccataactgcctgagatgcgggaatgagtcatcctctgcccaagcaggtggcagtgggcacacctgaagcaacaaagtccaggaacaatcagcacaacttatgactccagaggaggaagtccagagacagagcaccatgacttctgagaaaggtaaaatgkatccgggggcttggcaagtattcttgaacaatgcaagaatggtgtgtgtgtgtgtgtgtgtgtgtgtgtgtgtgtgtgtgtgtgtgtgtgtgtgtcctgctgattcttgcatctgtgggtgttttcaaacttccctattattgattaatatattagtcttaaataagatggtttattattagtaaatatttacatctccaagtgactttaaccaaatcagtgtttgtttcaccatgataaaaaattaagtagccaggcgctgtggctcacacctgtaatcccagcactttgggagtccaaggagggtggatcacttgaggcccagggtttgagaccagcctggccaacatggtgaaaccctatctgtactaaaaatacaaaaattagccaggcatggtggcgcatgcctgtagtcccagctactcgggaggctgaggcaggaggatcacttgaacacaggaggcggaggttgcagtgacctgagatcacgccactgcactccagcctgggcaacagagcaagactctgtctcacaaaaataaaaaaaaagttaagtaaaagtacaactgtttaaataacagtttaaggtaacaacagacgtgatagcatgagaacaatgtgctaattgacaaatgaattgactataactaattgataaatttgtgcacagtcagtgttagaaaaatgcatgggagaggaagaacacttcaggctgaaggaagtaatttcagctgagctaggatttgagctggattctaagagaagtgtagacctaaaaaaatttttatcttattttgtttttagagactagcgggtgggttcactacttcgcccaggctggtctggaactcctgggctcaagcaattctccacccttggtctctcaaagtactaggaatacaggcatgagccaccatgcctaaccaaatttttttttttttttttttaagactcgccctgttgcctaggctggagtacagtggtgtgatcactgctcactgctgtcttgacctcctgggctcaagagatcctcccgcctcascttcctgggtagctgggacaacaggcaygggccaccagccctgctaatttttttgtagagatgaggtcttgctttattgctcaggctggtcttgaactcctgggctcaagtgatccactagcctcggcctcccaaagtactgggattacaggtgtaagccaccatgccaggccagaagggcagactttggatcgacaaagaagaggagattccaggttgattgaatcctattgakraacagaatttaaaagcttttatagagacttgtgtctggaatataatgaataaactggttaggctacaaaaaatttatgtaaacaatttgcagtaagaccagaaagcaaatttgaagtgttattrtactatagaggacttcgaatgccaggctcaaggaatgaaagtttttctttatggtagagggaatatctttggagaatttatgaatagcacagagatatgactaaaatagtgctttagacacatttacttgacatgtgatgggttttggactggaagcaaggagaccagttagaagactattgcaatagtgtgagtgtgatggggcagaaggtaatatagatatcagtttggagttgaagtaacaatttattttctcctttatgttcttcatctgttagaattcttttttaaggtcaggtgtgatggctcacacctgtaatcccagcactttgggaggtcaaggcaggcggatcacctgaggtagggagtttgagaccagcctgaccaacatggagaaacaacgtctctattaaaaatacaaaattagctgggcacggtagcacatgcctgtaatcccgctacttgggaggccaaggcaggagaatcacttgaaccagggaggcggaggttgcagtgagccgagatcgcgccattgcactccagcctgggcaacaagagcaaaactccatctcgggaaaaaaaaaaaaattcttttttaagtggcatactgggggaaagaccaaacacattatttgattgtagtagctaataccttccctggacttttcttatgaaggtggtgtgttctatacctcaaactgtccccagtcatgtggctggtatccttgtctttgcatcccaggaataatattgatcagtgtagacacagcatatgtctcaccgtccctttctgaacttctcactgctgcttcagctctttcagagaaagtgtcttcccatcatcaaatgcctttttcctctgatgtggcctctgtttatgtaaggctccctcggagtagattactggttcaagggccccaatttgcactaagatctgagaagagctcattccaacgtgccagccacccccttcctccttcctcccaatgctcaaatcccccattcctcctttaaaagtaagagatttgttcttcaggtcacacttggaatagtgtttcctgacttcgtcctatttcctagatatctggctaatttctcattttagttcttctccccagctagaaccactctctgcaaaaaaaccatgccatgcccaagtcctttctacaactcctctaccatccagtgcaaatgcataaaaagtaacacacacaaacaggtacacacacagcctagggtaaagcatgctctgttttaaaggaagtgtcttccagagcctgtgactcttctctgttcaaaaatagcacctgcgagttaaggtttggccaggagcgtgggatgaatttcttgcctgcatctccccaaatcacccttagaggttcaggccttgtcagcgcccattttattgccaggaacatccccaagcctctgagtcctgagaggcgcaggtctctaaaattcagtactctcccttgaatcatccccatactctctaatggcttcttacacttagcatactatccagagctggtaaggccctgtggcttaccccctccattgctcatctccctccattgcaggtcttgatcactccgacccagccaggctgacttgcttgctcttccttgaacaagtcaaggtccacacttcaggtcgtttgcacctggtgttcccygtgcttggaaagctctccccttccccgacgtccacatgtcttgctctctaaatttacattcaggtctcagctttaatgtccctctttatagatgtcttctctgactgccatctctgatatggtcgatatggtgcccccaccaccttttgtctccttccagtacttttcttcttcctytttttttgagatggagtctctctcgctctgtcgcccaggctagagtgcaatggtgtgatcttggcttactgtaacctccacctcccaggttcaagtgattctcctgcctcagcctcccgaatagctgggattacaggcacgtgccaacatgcccggctaatttttgtatttttagtagagacagggttttgccatattggccaggctggtttcaaactcctgaactcaggtgatccacccgccttggcctcccaaaagtgctgggattacaggcatgatccaccgtacccggccgtctttttttaaatttttaaattttttttattttttaaagacaacgtcttgctctgtcgcccaggctggagtgcaatggcgatcatggctcactgtagcctcgaactcctgggctcaagtgatcctcccacttcagccttctgagcagtggggactactggtgcacaccaccatgcccggctaatttaaaaaakttggttttgttttgttttgtttttagagacggggtcttgctgtgttgcttayggtagtctcaatttcctagcctcaagcaatcctcccgcctcagcctcctgaagtgttgggattataggcatgagctatggcacccagccagggactcttttgactaagggagagatcaagataatccccactccctgaagccctgtgcattgggaatttagatgactgctcatttccacatcaattgttacttcccatctctcaattctagtgctggacctactattaggttctatacctaagagcagcaattgttgcttttttctctttccccttccaggttagcacgattcaaagggagaatctgtgtccacttgaggtcccttatgtagcaggactgccctgtaaatgtcttcaggaaccacttggctccagttggagcctggtccttttttgctggttcaataggatctttccatatgttctttacaagtatctttttacacttattactcattcagttatcttttctccttcctctcgagttgtggtttaaaatatgtataattacaattataaagagatatctatctatctatctatctatctatcatctgtcatcaaagatatcstggcttctctccacactaccaaatactctttcttattttttaattataatttttatttcagattcatggggtacacgtgcagatttgttacaagggtatatattgtgtgatgctgaggtttgggcttgtattgactctgctaccgagatagtgaacatagtacccaatgggaagtttttcagctctttcccctctccctccctcagtccttttggacttttccagtgtctattgttcccgtcttttttttttttttttttttgagacggagtctcgctctatcacccaggctggagtgcagtggcgcaaatttggctcactgcaagctccgcctcccgggttcacgccattctcctgcygcagcctcccgagtagctggaactataggtgcctgccaccacaccaggctaatttttttttttttttttttgkatttttagtacagacgggatttcaccatgttagccaggatggtctcgatctcctgaccttgtgatccacccgcctccgcctcccaaagtgctgggattagaggtgtgagccaccatgcctggctgttcctgtctttatgtccatgtgtacccaaggtttagctcccacttataagtgagaacatgcaatatttggttttctgtttctgtgttaatttgcttaggataatggtctccagctgcatctatgttgctgcaaaggacatgatttatgatttcattcttttgtatagctgtatagttttccatcaaatacccttttttttttttttttttagatggaatctcattctgtcaccaagggtggagtgcagtggcacattcttggctcactgcaagctccgcctcccgggttcaagcgattcttgtgcctcggcctcctgagtagctgggattacaagcatgggccaccatgcctggctaattttttgtatttattagagacggggtttcaccatgttaggctggtctcgaactcctgaccctcaggtgatccacccacctaggcctcccaaagtgctgggattacaggtgtgagccactgtccctggcccaaatacccyctctttctttctttctttcttctttctttctttctttctttctttctttctttctttctttcyttcyttcyttccttccttccttccttccttccttccttccttcccttccttccttccttccttcctttctttttttgagacagagtcttgctctgtcacccaagctggagggcagtggcatgatctctgctcactgcaacctctgcctccygggttcaagcaattctcctgyctcagcctccagaatagcagggattacaggtgcctgccaccacacctggctaatttttgtatttttagtagagacggggtttcaccatgttgcccaggctagtcttgaacccttgaccttgtgaaccacccgcctcagcctcccaagtgttgggattacaggcgtgagccaccgcacccggcccaaataccctttctttaaattgaaactttattttattttatttatttatttttttgagacgtagtctcgctctgtcgcccaggctggagtgcagtggcttgatctcggctcactgcaagctctgccttccaggttcacgccattctcctgcctcagcctcccgagtagctgggactacaggcgcccgccaccacgcctggccagttttttgtatttttagtagagttgggttttcaccgtgttagccaggatggtctcgatctcctgacctcatgatccgcccacctcggcctcccaaagtgctgggattacaggcatgagccgctgtgcctggccagtagttgcatttttagtttttcttttttaaaataaatttgcaaactgttttccagtatggctgtaccagtttacattcccaccagcaaagtatgacagattcagtttctctgcatccttaccagcatttggtgttttgcatgcgtgtctgtgcacgcacacctatacacacacatatagccattctgataggtgtgtaggaatatctcattgtggttttaatttgtatctccctggtgcaaattaaatggtgagttggtcacaagtactccaggttgccggtagttccttttgtgtgtgtgtgtgtgtgtgtgatttttaaatttcaaatataaacatatatatatatatatatatatatatatttttttttttttttttttttttttttttgagagggagtttcactcttgttgcccaggctggagtgcaatggcgcgatctcggctcactacaacctccacctcctgggttcaagcaattctcctgcctcagcttcctgagtagctgggattacaggcatgcgccaccacacccagctaattttgtatttttagtagagacagggtttctccatgttggtcaggctggtctcgaacacctgacctcaggtgatctgcctgcctcagcctcccaaagtgctgggattacaggcatgagccaccgcgcccggcctataaatatatttttaaattttctttttttggtggaagtgcttttttttttttttcttttgacatggagttttgctctcgttgcccaggctggagtgcaacggcatgatctgggctcaccgcaacctctgcctcacagattcaagtgattcttgtgcctcggcctcccaagtagctgggattacaggcatgtgccaccacacccggctaatttttgtatttttagtagagacggggtttcgccatgttggtcaggctggtctcaaactcctgacctaaggtgatccacctgcctcagcctcccaaagtcagccaccgcgcctggcctaaattttcaatcaatatgtgccaagtgattattatttaaaaatattagcttgagaagagttctcagactcaattttattgtcatgagcctcttacagtgaggtctcacagacttcctttttccttcatgccactgactctgagaccatctggcactgtgacacctctgttgggtaatcaagccataaatcaaaatctttagtctccaattcctgtatcgcctttctcaaaacgcagcctgagtctgaaaaataatgtacctgtaaccaaggactccaacacctatttaatcatctatcaaacctgaaataaaaacccaattttggccgggcacggtggctcacgcctgtaatcccagcactttgagatgctgagaggggcagatcacatgaggccaggagtttgagaccagcctggccaagatggtgaaaccccgtctctactaaaaatacaaaagttagccgggtgtggtgacacatgcctgtaatcccagctacttgggaggctcaggcacgagaatcacttgaaccctggaggcaaagtttacagtgagccaagattgcaccactggactccagcctgggtggtggagtgaggttctgtctcaaaacaaaacaaaacaaaacaaaacaaaacaaaacagaacaaatcaatttccaggtgattctatttcggaaattggaagaaattagggacttttgatcagtccatgcatttttgtcatagacttcaattcttttccaggaaatagttttgggtattttttttgttatttatttataattttagtttaattattattatctttttttgagacagggtctgtctctcttgcccctgctggagtgcagtggcatgctcatggctcactgcagcctcaacctcctgggctcaagtgattatcccacctcagctttcctagtagctgggactacaggcatgcaccactacagctggttaaacttctgtatctttttgtagagayggaaatttccccattttacccaggctggccttgatatcttaggcttaagcgaccatcttgccttggcctcccaaagtgctgggattacaggtgtgagtcactgcctacagcctggtttttkttttttaattttgttttgttgttattgattgtttttattttaaggaatttagtagctctagatgcaggcttatcttcagttttccacagcccttgctcactttcttttcatgggaatggcctgggcctaccgtagaaagcatacttcacagtatatggctagccctctatatgaaaaataaaacgtcagaaagtgtgcaatccacctctctccagccttaaaggtgcaaaaagcctcagagtcacttcaaaagtgttctgactttggagacatattccaaggactggctcaacttaggttctatgttatgcaactagacattcagctaacaatttggcagtcatggcgaggaaacatacacatgaggctcaattcaagggtagtaacttagtacgaaatgcagttggttcaaatgattctggctgggatgccaaatatgtaattgagatgtttatgttaccagtattattagttccctttttcctctgttaaatagctatttcacacacacacacacacacacacacacacgtatatacaacacactaggacaccaagtgggtatttttgcaacccaaactaaaaatccataagcatatgcatggcaaaccgaatagtagagataagaaagagaagtattcttacacaggaggctctcacctcctcaaaattcccaagttgacatttaatgtcaatgatgttcatgccattgaaataaacataaaacaggcatctttctaaccttctgaaaggctgccgtaataacagtgcttaacgtttatgaagcatctgctgcgtcaggcaccttgcaaatgttttccattcattgtgttacgtgagtcttccgacaaccttgtggaataggcaatcttagggtctacatttgacaaatggggaaactgaggtctagagaggttaggaaacttgccaaatgtgttagagcaagtaattggctaaactgggattataacccatttttctctgaccctagagccttggctcttgattgcaacactgtgttgcttctttagactagactgagattcatggaccattttaagtttgtaaccacctttgagagtctgaatggaggacgtggttttgcctggttttacttcctcctctagagtgcggggtccatattcctctgatgataagggccaggagagccatctaaacaaagtactgcttagatcactccaaagccggggccactcacactgcaccccaggaaactgaacctctgtcctttccagcccagactttcttccacggagtgacactgattagtttgtaggccaggtgaggcatgatttcataaccatggagtaatctgaccagggtcatgcaggggagcagcaggcctgcggtatataaattctcaaatacacatcttccatttatttccttatttctttctttaaaaaaaaaaaatttggcctaggcatggtgaatcatgcctgtaatcccagcactttgggaggctgaagcaggaggatctcttgagctcaggagtttgagaccaacctgggcaacacagagagaacacgcctccacaaaaaaaataacaaatgaaataaaattttaattttttaagagacagggtctcactgtatcacccaggctatgtacagtgacataatcatagctcacagtaacctggaactcctgggctctagtgatcctccctcctcagccactcaagtagccacaggtgtgtgctaacacaccctgctaattttacattttgtaggaatggggtctcactgtgttgcccaggctggtctcaaatttctggcttcaagagatccttctgccttggcatctcaaaaagctgggattataggtataagccactgcactctctctctatatatataaaatcaaagccccaccaatgccacctccttttctattttccaaactactccaccaccatggtctgcaccactccctgtgaggcccctcaaagctgtccatgcccatgtctacattaggcttctctacccatcgtgtcataacatttcctgtatttccatttctttctttctttttttttttttaaggagtcttgctctgtcactcaggctagagtgcagtggcgtgatctcggctcactgcaacctccacctcctgggttcaagcaattctcctgcctcagcctcccaagtagctgggattacaggcatgcgccaccacgcccagccaatttttttttgtatttttagtagagatgcggtttctccatgttggtcaggctagtctggaactcccgacctcagatgatctgcccgcctcagcctcccaaagtgctgggattacaggcgtgagccaccacaccgggcctatttttaatttttatttttgagacagagttttgctcttttgcccaggctggagtgcaatggtgcgatcttggctcactgcaacctcctctccccaggttcaagtgattctcctgcctcagccacccgagtagctgggattataggtgcccgcaatcacacctggctaatttttgtatttttggtagagacagggtttcaccatgttggccaggctggtctcaaactcctgacctcaggtgaaccacctgcctcggtctcccaaagtgctagaattacaggcgtgagccaccgcacccggcctctaagaggctttaagaagtgactttcccattgtgcttaatcatttttgttgaagccttaaggcagactaccttgtttgggattgggcatctgggaaaagagattttggcagagtccttaaaaatcttgcttttcttgggtacaatgagctggtccaatacaattaatccatgagagaatcttcaaattccattttctgagatgatttggaggtttggaataatagagcactttttcttagcaactcatttgatatttgagtgttgtttgacataatcatatcttggtcaacaggtccttcaaccggtgaccccactctgaggtaagaataacactatcacagtgcccatttaatttgatcaagaatcaatgggtatttaagagytgtgcatggtggcacatgcgcctataatcccagctactcaggaggctgaggcaggagtaggaggatcgcttgagcccaggaggtcaaggctgcagtgagctatgattgcaccactgcactgcagccggggtaacagactgagaccctgtctcaaaaaaaaaaaaaaaaaaggaactgtggatatagctttctttattgttccttttctcttttgccattttccattctttctttcatttttgccttttccagtttcattttctatggttattgttttttatatctttgctcttatgtcttttgatctctttaaataaatgattttctagcttgcttatctgttattgtcttacaatttctcttctttttttaaatcgcatgcttttatagccattagtgaaatacctgggaaactcatttgtcactttaacttcatcttcgttttataatgtctgcccatttttcagacataggacagggaagtcatgttaaggaatatattatctcttgataggtggaaggattgatctatgtagtaaatgaatgtgatactttagggatgagtgggaactrttaggatgtaataagcttgtgacttaaccatattgcaaagaagagtctgcagttcaattctgagtttcccttgagttacagctttcagacatagagagtgttaaatctaaagacaccactgagagcaagtagaatttctttcttataggagttagtatatagaatcctaatgtggaagaatcttgaggctaaattgctcttttgtctgttcttgacaatacaatcttgttggcaatttgaggcgtcaacacttgagaaaatctggttagagtccattgaggaatagaaaagataaggattggaacatagcacctctaggtgtaaaatagaaaagttagaatatagctaggcatggtggggcacacctgtggtctcagctactcaggaggctgaggcaggagagtagcttgagtccaggaaggggagatcaggctggccagcttagagagaccatgtcttaaaaaaaaaaaaaaaaaagggttagaatataatgaaggaaaatttaaaagagaaacaaagacacacttacacctgaattcaagactaaaacataatggtattagagagtggtcaccaaataatgtgactgggggaagaaacctgtgcactatgtttgtgagaaaaaaaaatctgataattcaaacagacctcttcagataactttgagacatatactagaaaaagaagtttcctgagatgttatgtctcagatcagcctgatagaagaggggagcagaggctgggcgtggtggctcacgcctgtaatcccagcactttgggaggctgaggtgggcgaatcacaaggtcaggagtttgagaccagcctggccaacatggtgaaaccccgtctctactaaaaatacaaaaaaaattagctggacatggtggcgggagcctgtaatcccagctacttgggaagttgaggcagaaaaatcgcttgaacctgggaggtggaggttgtggtgagmtgagattgcaccactgcactccagtctgggcaacagtgtgagwctccatcttaaaaaaataaaataaaataaaataaawtaaaataaagaagaggggagcaggaaaagatttctaagatctctctaaatrtggcatgacagtgtgggctgctttttgtatttcaggagaagaatcgaaccctrggagtttgacgtcttctatgaccccagagaacttcgtaaagaggcctgtctgctctacgaaatcaagtggggcatgagccggaagatctggcgaagctcaggcaaaaacaccaccaatcacgtggaagttaattttataaaaaaatttacgtcagaaagagattttcacccatccatsagctgctccatcacctggttcttgtcctggagtccctgctgggaatgctcccaggctattagagagtttctgagtcggcaccctggtgtgactctagtgatctacgtagctcggcttttttggcacatggatcaacaaaatcggcaaggtctcagggaccttgttaacagtggagtaactattcagattatgagagcatcaggtaaaaacagtaaacaaagaaacttcattgtttacaacagactgtggtgatagtagctgtttttaggccagaagattggttagcccaggctggaagtctcagaagtaaaagtccaaaataatgtcataaaggactaggtctgaaattcatgacaaggaaagttacaaaaatacaactcctggctacgcatggtggctcatgcctataatcccagaactttgggaggccaaggcaggaggatcacttgaagccaggggttcaagatcagcctgggcaacatagtgagaccccatctctaaaaaaaatttaaaaatccggccaggtgcggtggctcacgcctgtaatcccagcactttgggaggccgaggtgggcggatcatgagatcaggagatggagaccatcctggctaacacggtgaaaccccgtctctactaaaaaatacaaaaaaattagccaggcgtggtggcgggcacctgtagtcccagctactcgggaggctgaggcaggagaatggcgtgaacccgggaggcggagcttgcagtgagccgagatcgcgccactgcactccagcctgggcgacagagcgagactccgtctcaagataaaataaaataaaataaaataaaaaataaaataaaaaaatcagacaggcatggcagcatacacctttaaaggctgaggtaggaagatctcctgagcccagaagttcaaggctgcagtgagctatgattggaccactgcacactggcctaggtgacagagcgaaaccctgtatcaaaaaacaaaaacaaaaacaaacaacaactcttttttttttttttttgagacggagtcttgctctttcgcccaggctggagtgcagtggcgcaatctcgactcactgcaagctccacctggggttcacgccattctcctgcctcagcctccccagtagctgggactacaggcgcccaccaccacgcccggctaattttttgtatttttagtagagacggggtttcactgtgttaggcaggatggtctcgatctcctgacctgtgatccacccccctcggcctcccaaagtgctgggattacaggcgtgagccaccgcacccagccaacaactcttttctctagtcttgcctctcagccatctttaaatgaactgctttattctttttagggggtctaatgtccagcagcaactagactagagactacaggctttctatacgggaagctaggttggggatcttcttaagtaatttaccattgtgcttgttgaatgagccaagatttgtgtttccttagagtattatcactgctggaggaattttgtcaactacccacctggggatgaagctcactggccacaatacccacctctgtggatgatgttgtaygcactggagctgcactgcataattctagtaagtcactttagggacacaaatgttgatgcaaaaagaagcatccttcttcaaagktctttcctgagaaaatttgactcatatcttctttttgacatttatattgagatttagttatttaactagctagctcctcttaagaaaatctcagagccaggtatggtggtgcacacttgtagtcccagctacgcaggaagcttgagtctaggcgttgcaagctgcagtgagctatgatcacgccaatatgctccagcctgcgtggtataacaagatcctgtttctaaaacacagctgggtacagtggctcatgcctgtaatccaagcactttggaaggccaagatgggaggattgcttgagaccaggagtctgagaccagcctggccaacataatgagaccccctctctataaaaaagaaaattatgtatcaaacaaactaaacaaacaagcaaacaaacaacatctaagcctaagaacaagaagtgtgtttgtgggaggtaagtggagaagggaatttgggtaaaccgatctaagatatgggtggtccccatattaattacattttatcatttttattcttattttattatcattatcttttaagccacagggtctcgctgtgttgcctaggctggggtgtagcggctattcacaggcaccatcacagcaacccacagcctcaaactccgaattcctagcctcaagcaatcctctgacctcagccttctgggtagctagaactacaggcgtgtgtcatcatgtctggctttatcattattattgttcttgttactacaacacatattggctctactgtatttcagatattctcctttctcttattagtgtgtgtaatcttattgaagagaatgtacgtgttccattggattctcttgaaagtggttcaggctgggtgcagtggctcatgcttgtaatcctagcactttgggaggcagaggggagtggatggcttgagcccagaagttggagaccagcctgggcaacatsgcgaaaccacatctcaacaaaaacacaaaaaaattagctgggtgtggtggtgcgtgcctgtagtcccagctacttgggaggctgaggtgggagaattgtttgagcctaggaggttgaggctgcagtgagctgtgattgcaccactgygctccagcctgggtgaatgcagtgagtccagaaccagaccctgtctgggaaaaaaaaaaaagaagaaatagttaaatcrtcttccaactgacattttwaaatgtttgtggtgataatattattaattaaaatattcatcctaaggattaaatataatccttttttattccagagtcttccaccctgtttaaagatttcaagaagatggcaaaatcatcttacatttttcagacttcatcttcaaaactgccattaccaaacgattccgccacacatccttttagctacagggctgatacatccttctgtggcttggagatgaataggatgattccgtgtgtgtactgattcaagaacaagcaatgatgacccactaaagagtgaatgccatttagaatctagaaatgttcacaaggtaccccaaaactstgtagcttaaaccaacaataaatatgtattacctctggcagtttctgtgggtaaggaatttagaagcagcttatctgtgtgttcctgtctcaggtcccccacgaggttgtagtcaagatggcagccagcgctgcaatcatttgagggcttgactgaggctggagaatgtgcttcccaggtggcaggctcagatggctggcaagtttgtgctagtggctggtagaaggtttcagtttcttgccacacaggcctctccacagggttgcttaaataacctcaggacatggcagttggcttcctacagattaatttaccttttgaaaaatttcctgtagagatggagttttgctgtgttgcccaggctggtctcaaagtcctagactcaagtgatccaccagcctcggcctaccaaagtgctgggattaccagtgtgagccaccatacctggcccagagcgagtgatcgaagagagaccaaggtggaaatttccacgactttgatgayttcatcttggaatcacaccctatttcttttgcagtattctatttgttacacaggccagccatgattcagagtaagaggggactcatacacaaggatttgaaactcaggacatgaaaatcactggaagccatcttggattttccctgtaggggctttctctgttttcagacaaataattacatggaatcaatttctgaagacacagatagagggaaacaaaagacaaagtagtaacatctattattatttgtttcttaattagaatatcatgagattcacaggtgatttatagaggactggatgaccagatgcagagaggagctaccatctccatgagagcttcggagacctgcagagacattgcatgacttgcctgcggaagttgtttgataggaattctcattggtttacagaaataatattggttagtgattggctatacatggtgtccagcacagggcattttgtggctgcttagtgtcagtctagagcccatgttgcaaggggctttaagaggtaattagctcaagcagagagtgagatgtgattgctgtcacattttttttttaagtttttttatttttatttttttttttttgagacagagtctcactctgtcgcccacgctggagtgcagtggcacaatgtccggctcactgcaagctccgcctcccaggttcaggccattctcctgcctcagtctcccgagtagctgggactacaggcgcccgccaccacgcccggctaattttttgtatttttagtacagacggggtttcaccgtgttagccaggctggtctcgatctcctgacctcatggtccgcccgccttggcctcccaaagtgctgggattacaggcgtgagccactgcgtccagcctgctgtcacattttaaatattcctctgggcttgataatttaaaggagctcacattcctcagataaaatgttcattttctttctcaaacctaaacataatattaaccaccgctatattatcatttttagtaggaggatgagaagggctaaatcagacacaattacaaaaaactcttagcctactcatcaattactcatataagctgagtaacagcaattctaatttataactcctttataataatattaaatctactaatgaggctgggtgcggtgactcatgcctgtaatcctagcactttgggaggtcgaggagggcagatcacttgaggtcaggagttcgagaccagcctggccaacatggtgaaacgcggtctctactaaaaatacaaaaattagctgggcgtggtggtgcacgcccgtaatcccagctactcaggaagctgaggcaggagaatcgcttgaacctgggaggcggaggttgcagtgagctgagattgcaccattgcactccagcctgtgggacaagagtgaaactccatctcaaaaaaaaaacccataaataaataaataaataaataataaatttacgaatgagaggagagtgaaaagtaccagttaggcagatagctaggacatgtccttggtagaattcctttctaacaaagaaacagcttgaaagatcaagctgcaagcacagatcagggggcaaggtccaccataaaaatgccttctgtgtaactaactaaggtcacagtctgagctgtcaaagtgtcagtcaaaatcttgggtttatatgtattttggagtctagtagttgaggtcaattactcacatgtgtggtctgatgaggtgtgacatactactcttgcagggaaggggaattacaatctatgttcttatcacagcaatacatgtatcactcaagtagcaaactatggaagtagaatcattttaaagctttaaaacagcacttttagcaggaaatttagcccagggaggagcctctgtagatcaaaccattttctcattacacttagcaggtatttcatcaatgttaggtgctactaattttatcacaacaattattaatatacaaccacaaattatatctcaatgtcaaaaatcatcatttatttgatctgcattaattacagctgtgcttttgctactttctcttccagttttagcattgatattactatacctgtgctattcaaaaacataaccttaatactgctgttttatcccacaaggagactcaattttatatcaatgttgtattctgattctttctcttgcagaagtttatgttgttattttactcagatgtagaagagtttcacatgtaacatattcggttaataggaatagtctaaaccatgatatctattggtttcttaagattcactgtataagcctgatacggtttggatatttgttccctccaaatgtcatggtgaaatgtgattcccaatgttggaggtggatcctaatggcgatatggctctgatgaatggaggaacaccagggtctttggtctcctgctgatttagataaaacaacacggaaacaccttgagtggttttaaggagtagagagtttaataggcaggaaagaaggaagaagctctcctgtacagagacagagggagtgaggctccaagggagaaacctcgtgtgtggtacggaagtagttggttatattaggaagctggaggaggaggtgtctgatttgcatagggcccaagggattggtttgaccaggtgtgtcattcacgtagaccacaaaaaaccctggcactcccaccttagccctttaatatccaaatgcaggccaccaagatgtcctgagcatgtgtgagttatctggaggtggctatgacacttggcacatgtggtgacaatgagaagagggtgggaattgccatgttggccatgttgggtggacctagtttctaatcactggcatttgcatatcaaacttgccggcctggtttttcaagctgcctgttagaaaagaaatggtttgggggttgcttctcatgacaggaaaatttccactgagaacttttaccctttctagtggcctaacaattatttcctaataactcctgtattattccctgcctcaagagaagtaaacctaactgctgttaaggggtgttggacgacaattctttctggctacttcctgttgaaaaggctcgtcacgtgagggacagcagttggtcctcctcctgaggttgatctaagtgttctaggaagaatggtgtgtccatgggtggctctgctcgcagcgttgtttggagtttgattgcttctaggtgaaaagagataaattttacaagaagatttaaaatatagggttagagtatgagtattaagatgaccaccattagagggaattctgtagaccataactgagtttgaaatctgttagttacaccaaagggttgcaataccggttttcgtccactagatgccgttgtacattaccagagactttatataaaagtaacattttccttgagaaaagcatacattttccttgagaaaagcatacattttccccttgacttcccattagagaataatttttggcataggccatttttgtgagttgcaatatgattgggagaaatatgatattgggtggctaaaataactttagcattaatcttggcaattcttttcctttaattagtaaattcttttgtgactttcacagaccctcttacaacatactcaaactctctgacttgtcctaaacatccttcctgtatacaaccagtcatttccttttaggacaagaatttaccatacacaatccttccttatataaaatctttctttataaacttcttttaatagtttagaatgcatcctattaccaactttcagtaaaaagtcatatcaaacttaatgatagtaaaacttttatactttcatgcttgctttttttctttttttgatatggagtttcgckcttgttgtccaagctggagcgcaatggcacgatctcagctcaccacaacctcctcctcccaggttcaagcaattctcctgcctcagcctcccgagtagctgggattacaggcatgcgccaccacacctgtctaattttgtattttttagtagagatggggtttcttcatgttggtcaggctggtctcgaactcccgacctcaggtgatccacctgcctcggcctcccaaagtgctgagattacaggcatgagccatcgcgcccggccttatgcttgcttcttatccataactatcactcctgctataagcaaaataaccttgactaaatctttcctgcaattattaatcctaagataaggaagataatcaggcaaaatattataacaattagaattttacaaccaaaattccgcattgtgggtgccacggtgtatagttccatcgcaaatagtggtgtaactataacatttcccacaagagtggcatagtaaataattttcgtttaaatctttacttgcctagatataacatttccctttggggatctacaaagttacaaatgcaatcccatgtataattaaatctcgctgcaaatatgccttaaaaggaattttaatatttggtggcagattttgagaggaaaggcagaaataataaaaagtacccgatgaggtaggagtagccctcactcagttacttatcttttatgattttcagtttaagatcttctatttctccacattgatattcaggacgtgcctctgggctgtcagaggttgatccctcagctgttcaggctttgacttgaatgtggaagtcaggagttgattcctgtaacttttactgccaatggggttgaaagaagaacagtgtagggcctttcccagcttggcttagggaaggagacagagatgagggttttcactaacactaaatttcctgggttaaataaaggtggttctgtttcctggggttggacttctgttagttgcgttaattcttgttggaagtgagctagagaggttacatgcttaaccaatttagaggtttcctgcctgaaaacaatctctgagcacactgataagttttatcctttcccaagtgaaaagcttggtgaaggattttaaggacattggctggaggctggcaaatggagtttgccatcctctgactgtagcctttctgagggctgggaactacgtcctcgagaagtggcctattttatttctgcagggaaatactgaggtttaatttttcttatggagccttcctagattagaaggggcttaagtgccttaacggcttgaggcttccttgcctctgacttaactgcctgatcagctaacctatttcctttggctacctcatttgttcccttttgatgttccttacaatgcattcctgctatttcttgtggaagaaaaactgaagataacctgctaatttcctggtgatatttttataggggatctattaatggtaagaaaatgtcttttctttctttctttctttttgagacgaagtctcgctccgtcgcccaggctggactgcagtggcgcgatctcggctcactgcaacctccacctcccaggttcacgccattctcgtgtctcagcctcccaggtaggtgggactacaggcgcctgccaccacgcctggctaattttttgtatttttagt

SEQ ID NO: 94971 - DNA, 43508 bp, Homo sapiens
  misc_feature (1)...(43508): n = A,T,C or G
tgtaggcgcccgccaccatgcccagctaattttttgtgtttttagtagagacggggtttcaccatgttggccaagctggtctcgaactcctgacctcaggtgatctgcctgcctcggccttccaaagtgctgggcttacaggcatgggccaccgtgcccagccgtttatatgtattaactcttaatcatcaaaacaaactatgtggtattaccataattatcgccatttatacaaagcaacagagggataaggagattaaggcacttgcccaagtgcaagaggtaggacaggaacccagagtcccgtgctggtagctgcttttctgtgcacttaacattatctcatttaattcttgcagtcacttcatgaagaaggtggcggtcctagggcattggagaagttatgtgcttgttcaaggtcatgcagctggaagatggtggtggtaggacaggaagtctgtagggcctgattctgcagccctctagtctatactcctttgctcctgtgtccctcatcccccctgcagaatgggcaccccgttacctttctgagccactgtgcgcagaaaagagagcatgttggccaggctggtctcgaactcctgacctcaagtgatcagcctgccttagcctcccaaagtcctgggattacaggcgtgaaccaccacgctcagcctctgaatactttgtactcaagccatttttcagtgctgtgtttgcagtgagcacacccgagggatgaagacacgtctccctgtgggaacctgggcttaccagggcccctagaggaggggaatctctcaagctcagagctctatggctgcggtgcaggcccactgtgtgcatggtgtcagtctgggcccttccatgttgcccccgtgggacttggggtaaggggaactgatgcaaacatcacgctgctgttgcttggtgtgagcaattaattcctgtggctctcacccaggagtctcatgtctttgggtcagacaaactcatcagcttgtagaaatggcacagtcccacgggcctgttagaatcttctattgtgcacatgttgctcttaaaatatacaaatcagttttgattttaaaaaattatttatttttttagtgataggagttttgctacgttgcccaggctggtttcaaactcttgggctcaggaggtcctcccactttggcctggactgccagcataatgtatcaccacacccgggactgattttcgtttttcaagaacaaaaaccaaaaacatacacaaaccgagagtcaaagcttgctaattagaggaaagtcaggaaatgggaaccattcaaagaagaaaatacccccacctcctactctcacctatccaaagacaattaggtgaatcccttagtagatatctttccagacggttttccatatagattcccatatctggccaggcgcggtggctcacacctgtaatcctagcgcttggggaggctgaggcggatggaccacctgaggtcaggagttcgagaccagcctgaccaacatggagaaacctcgtctctacgaaaaatacaaaattagccgggcacagtggtgcaagcctgtaatcccagctactcaggaggccgaggcaggagaattgcttgaacctaggaggcagacattgtgctgagccgagccaagatcatgccattgcactaaactccgccttaaaaaaaaaaaaaaagattcccacatctttactagtttgcagaaataagatcctagcatatgcagtgtgtaggaaccaccttggtttagccacgtctctgtgactgggggccactgtggtgacccccagctccccggacagagtcaagagctcaccagcctgcaaaggttttcacggcccccagccagactcgggggcttcctcttgccctgctacttcctgggagctctgagggcaggaaatggcgccactcagctcctggcctaacagcttggggaccacaaatgcaaaggaaaccaccctcccctcccacctcctcctctgcacccttgagttctcaggctcacattcccaccacccacctctgagcccagccctccctagcatcaccacttccatcccattcctcagccaagagccaggaatcctgattccagatcccacgcttccctgcctccctcaggtgagccccagacccccaggcaccccgctggcccctgaaggagcaggtgatggtgctgtcttcgcccagcagctgtgggagcaggcgggtggggcaggatggaggggtgggtggggtgggtggagccagggcccacttcctttccccttggggccctgtccttcccagtcttgccccagcctcgggaggtggtggagtgacctggccccagtgctgcgtccttatcagccgagccggtaagagggtgagacttggtggggtaggggcctcagtgggcctgggaatgtgcctgtggcttgaaaagactctgacaggttatgatgggaagagattgggagccattgggctgcacagggtcagggaaggccaggaggggctggtcactgctggaatctaagctgctgaggctggagggagcctcrggatggggctgatgggggagctgccagcatctgttcctctgtcatttctgataacagtaaaagccagcatggaaaaaaccgttaaaccgcaggttgggcctggccgttggcagggaagtgggcagaggggaggcccggccaggtcctccggcaactcccgcgtgttctgcttctccggctgcccacctgcaggtcccagctcttgctcctgcctgtttgcctggaaatggccacgcttctccttctccttggggtgctggtggtaagcccagacgctctggggagcacaacagcagtgcagacacccacctccggagagcctttggtctctactagcgagcccctgagctcaaagatgtacaccacttcaataacaagtgaccctaaggccgacagcactggggaccagacctcagccctacctccctcaacttccatcaatgagggatcccctctttggacttccattggtgccagcactggttcccctttacctgagccarcaacctaccaggaagtttccatcaagatgtcatcagtgccccaggaaacccctcatgcaaccagtcatcctgctgttcccataacagcaaactctctaggatcccacaccgtgacaggtggaaccataacaacgaactctccagaaacctccagtaggaccagtggagcccctgttaccacggcagctagctctctggagacctccagaggcacctctggaccccctcttaccatggcaactgtctctctggagacttccaaaggcacctctggaccccctgttaccatggcaactgactctctggagacctccactgggaccactggaccccctgttaccatgacaactggctctctggagccctccagcggggccagtggaccccaggtctctagcgtaaaactatctacaatgatgtctccaacgacctccaccaacgcaagcactgtgcccttccggaacccagatgagaactcacgaggcatgctgccagtggctgtgcttgtggccctgctggcggtcatagycctcgtggctctgctcctgctgtggcgccgrcggcagaagcggcggactggggccctcgtgctgagcagaggyggcaagcgtaacggggtggtggacgcctgggctgggccagcccaggtccctgaggagggggccgtgacagtgaccgtgggagggtccgggggcgacaagggctctgggttccccgatggggaggggtctagccgtcggcccacgctcaccactttctttggcagacggaagtctcgccagggctccctggcgatggaggagctgaagtctggrtcaggccccagcctcaaaggggaggaggagccactggtggccagtgaggatggggctgtggacgccccagctcctgatgagcccgaagggggagacggggctgccccttaagtgtcggtgaatagtgaggctggaggccggaatctcagccagcctccagcaccttccctctcaccatcccactgccccctcgctcccatgtttccacccggcaccctgatcctcacccgaatctcctttttttttttcttttgagacagagtttcgctttgtcgcccaggctggagtgcaatgcacgatctcagttcactgcaacctctgcctcctaagttcaggcgattctcctgcctcagcttcccgagtaactgagattacaggcacccaccaccatgcccagctgcttttttgtatttttggtagagatggggtttcaccatgttggctaggctggtctcaaactcctgacctcaggtgatctacctgcctcagcctcccaaagtgctgagattacagacatgagcctccgcgccttgcctcctcacccacctcttcactctgaatcctcatgaggcttctcagccctggatttcctgctgccatcctcacccagcacccacaactagcgcctgggcagggcagggctggcacctctcaacgtctgtggactgaatgaataaaccctcctcatccacccctatttatctccatcaccatttccccctctttcttgttcctggaaacggctgctgagtctccatcggccaaacttatctgccctgtgatttctttgacaattctccttttcccccagaacccaccctgggttgaccagagtctgggaagaaggacaagagaacccggcaaactccctcctaggattaactttgtaaagcacccttgccctgtagctgcaagggctgtggaacctgggcagcccgcaaccacctttagctctgggccccccaggccagcctggagcatggctgggtggggccaccagcccatgctctcaggcgggcctgtgatctttcccagggcacatggactgtaggctggccctggcccacaccaccacactctccccagccatggacagaggcagccagaggcctcacggtttctcctccgagtttctggctgggtgtagttctcagaaaccccagtgcctgcgtgtgtccactcgtgggtgtggtttgtgtgcaagagctgaggatttggcgatgcttgggaggggtagttgtgggtacagacggtgtgggggtgggaagtggtgcagagactgaagagggtcaacctgggcatgggggacacagggactgctgagaacgtgcgtgtcatctttgctctgatggggtggacatagcagaaaatctaactctgtctgtagccccatacagaatgccagggtgagcacagtggctggtgcctttaatcccagcactttggaaagttgaggcaggaggatcgcttgagcccaggagttcgagtctgaagtgagctgtgattgcaccactgcacttcagcctgggcaacagagtgagcccctgtctcaaaaaagaaaagaaaaagaaagccaggcttcatggaaagatcgtatgtgtgacccaaatatgagttcttcagctcagccatggtaatcccttccttgaagtctccatttctgcagtacacatgcatgtgcgctctctctctctctctcacacacacacacacacacacacacacacacgcgcgcgcgcgcgcgcgcgstctcctgcgaacagaggcagggggagaggggtttgccctggtctcggggactggtctggctggcgcttccccactgcacgtttccaggtttagtttgtctgtgtctcctcttccatcccaggggctgagccccttccatcctccaagaggaaccagtgagagtgagtgaaggaggggcctggagccagggacttcccctgtggggcctgggtggagaggggagaactcaatggtgctgcctttgagaccagcccaggctacagcccaggagcacacatgggccagggcagttggtatttcccgaggacaaagaggaaattttcaaagaggaagttgttgagttagagcttgcggtggctgagagcagacaggttgacctgcaaaaaaagacaggggaggcatgtgagtgtgacagccctgctctgtggcctgggcaggagatgggggaaagggtcaggtgggggatgggctcgtgcagtgggagaggagacggagggagggagcgggaaggggcttgcttagtgggtgggaagagctgagctcggatggaaccagcttctaccagccaggctgggcacccactgggctgcatctggtggccttttctgattgctatttggactcactgcagctgcagaatgacagaggccatgtccaaaatcccttagagacactgntgtcttagagttgttaaaataagagcccccatatcaggtttagaaaatactgtcaccgaacgaacgtcgctgtcctcagctccacctccctttcctttgacagatatggttgttttctaagccaggactggttttagtcaggtcctgggcgaatcctgaaaaaaagaggtagtacgggtaaggaaggcacccaacagggctttcacaatccagaaaatatcaaaatataagtgttaaaagagaggcacaggccgggtgcggtggctcacgcctgtaatctcagcactttgggaggccaaggtgggcagatcatgaggtcaggagtttgagaccagcctggccaatatgatgaaaccccgtttctactaaaaatacaaaagttagccaggcatggtggtgtgctcctgtaatcccagctacttaggaggctgaggccagagaattgcttgaaccctggagtcagaggttgcagtgagccrggatcatgccactgtactccaggctgggtgacaaagtgagactgtctcaaaaaataaaaataaataaaataaataaaagagaggcacaaacagtgttatgaatgcaccaaggaaaatggtgcattcataactctcaggtgaagcctaccaagccatgcgtgtgtgcacatatgtgtgtacgtgtgcatgtgcgtgcgtgcatgtgcgtgcgtgcatgtgcctgtgtgtgtatgtgtgcacatgtgtgtgcgcatgtgtgtgtgtgcgcgcatgtgtgtgtgcatgcatgttctcccatgcatgtgtactgtggcaagggagactttgaggaagagattccagtggctgagcagaagggctcgcattgccctggcgaaaggttggaaggcttcacctgagagtgtgtcgtggcctttgtcatatccactgcttgattcctttctttaaaaattatttttattgttttctacatatgagaaccaccacacctggctaatttttgtattttttgtagagatggggtttcaccatgttgtcccggctggtctcaaactcccgggcacaagagatccacctgcctcagcctcccaaaatgctgggactataggcatgagccactgcacccagccactgcttcattcctggtggctgctgtgcctggcatgttgcagatcctccatgaatatgcatttgaatgaatgaatgaatgaatgaatgaatggagatgacgcctcagagattctttcttttgagatgaggtctcattctgtcacccagactagagggcagtggtgcaatcacagctcaccacagcctcaacctcctgggcctcccaagtagctgcgatcacaggtgtgcaccaacatgcccagctaattttttttttaatttttaatttgtacagacagggtcttgctgtgttgcccaggctggtctcgaactcctgggctcaagtggtcctcccacctaagcttccccaaatactgggattataggtgtgagccactgtgcccaggcttgcctcagatatttgaaggctgggaaggattttgcaaagctgggaaaaggaaaaggcattcccagcagaggggatagcaggtggaaatacataattaaaaaaaaaaaacgtggagcagatccagcgcagtggctcatgcctgtaatcccagcactttgggaggcagagcagggaggattgcttgaggctaggagttcaagaccagcctgggtaacatagaaagaccctgtctctacaaaaacacaaaaaattagccaggcgtggtggtgcatgcctgtagtaccagctacttgagaagctgaggcaggaggactgcttgaagccaggagtttgagaccagcctgggcaacatagtgagaccccgtgtctacaaaaagtaaacatttatatatatattttttaaagtggagcagttcaatatagagtcttttttgaacaaacgtgaaatagatgtcttttttttttttttgagatggagttttcactcttgttacccaggctggagtgcaatggcgtgatcttggctcaccagaacctccgcctcctgggttcaaacaattctcctgcctcagcctcccaggtagctgggattacaggcatgcaccaccaaacccggataattttgtatttttagtagagatggggtttcaccatgttggtcaagctggtcttgaactcccgacctctgctgatccgtatgcctcggcctcccaaagtgctgggattacatgcgtgagccaccgtgcccgacaatagatgtcttttaattttctggaggaaaaagcaaagcaaaagaagcagtggatattttaagactaaaaaggaaaacaaaaaaaggagatagagcaggccagacgtggtggctcaacgtctgtaatcccagcactttgggaggccgaggcaggtggatcacctgaggtcaggagttcaagaccagcctgaccaacatggtgaaaccctgtttcaaaatacaaaaaattagctgggcgtggtggcgggcacctgtaatcccagctacttgggaggctgaggcaggagaatcccttgaacccaggaggtggaggttgcagtgagccgagatcacgccattgcactccagcctgggcgacaagtaaaaaactccatctcaaaaaaaaaaaaaggagatagagcaaggaacagtaagaaaatagttgggtgcagtggctatgcggtggcactataggaggctgaggcgggcagatcacctgaggtcaggagttggagaccagcctgggcaacatagacccctatctctacaaaaaatttgaaatatgaaaaattagccaggtgtagtggtgtgcgcctgtggtaccagctactcaagaggcgaaggcagggaagattgcttgagcccaggagtttgaggctatagtgagctgtgatcatgccactgcactccagcctgggcaatagtgtgagactctgtctcaaaagaaagaacatggccaggcgtggtggctcacacctgtaatcccagcactttgggaggccgaggcagtcagatcatgaggccagtttgaaaccagcctggccaacatggtgaaaccctgtctctactaaaaatacaaaaattagccaggcgtggtggcatgcccccgtaatcccagctacttgggggtctgaggcagaagaattgcttgaaaccgggaggcagaggttgcagtgagccgagatcgtgtcattgcactctagtctgggcgacagagcaagactccgtcttggaaaaaaatttaaaaaaagaaaatataaaatatggtataagattaaatatattagttatgaaaataattgtaaatggcttattgaacttatagtcagtaaaaatcatgtttttgaaaattatgtaatgactttggaaaataccagcaatataatgttaagtggggaaaaaagcaagttactcctctgtaatacatatgattttagttttgtaataaaaattcccaaccatatatgcacttatagggaaacaaaggacccatcgcaaatgttttccatgctgatctccaaagtggtgagtttatgtgtgatttttattttgtttatgctcttctgtattttccgaatttcatacaataaatatctgttacttttacaatatgaaaaaatagtggtcaaaaaggtgttcaagggggtggcctgggggtgtctggtttgaggagagtggtaggggatgaggctgcaagtggaggttggagccatgctatgaaaagttcaagagtttgaattgagttctgaggtttgtttttgtttttgtttttgttttttgagacggagtctcaccctgtcacccaggctggagtgcagtggcacgggttcatgccattctcctgcctcagcctcctgagtagctggaaccacacgcgcccgccaccacaccaggctaatttttttgtatttttagkagagacagggtttcaccatgttagccaggatggtctcgatctcctgacctcgtgatccacctgcctcggcctcccaaagtgctgggattacaggcgtgagccacagtgctctgcgtgagccatagtgctctgctgagagtttgaattgcattctggaagtagtggtgaaatcaacacacctaagtctgctcttctcctctcttctagtccccagagtggtgagtagcatcgttctggtggcccaggcaaaacgccttaggaccaccgtgcagccccactctttccccattcctgctctccaggtgccaagtccctggctcttcttccaccgacccttgcatcccttccttctcttcagtcctcatcgcacctcaccgggatcctattgacacttcccctttgatttccttccgctctctgctagtgatggtcccagggacccttctaaaargtcactgtgggctgggcacagtggctcacgcctgtaatcccaacactttgagaggctgaggtgggccaatcatctgaggtcaggagttcgagaccagcctggccaacatggtgaaaccccatctctactgaaagtacaaaaattagccgggcgtggtggtgtgcacctgtagtcccagctactcgggaggctgaggcgggggaattgttggtccccgggagatggaggttgcagtgagccaagatcgcgccgttgcactccagcctgggtgacagaatgagactccgtctcaaaaaaaaaaaaaaaagaaaaaagaaaaatagctgggcatcgtggcacacacctgtagttccagctactcaggaggatgaggtaggaagatcacttgagcccaagaggtccagactgcagcgagtcatgatcacaccactgcactccagcctgcgtggcaccctgtctcaaaatataataataataaaatttaaaaataaaataaaacgctgctctgtctaggtgatattcctctatccccaaggctgtcagggtggaaccctccttccttagcgtggcatataagcccctcgggacctggccctatctctcctctgaccacccctgcccggtcagcccttgttacagacagtctgtgctatccagccccatcaaattcctgttgctccctaaatatgccacacactttatttggaggagaggggtgaagaagggtagtttaacatgttcaaaatatttattttttccagacagtaaaataacattttttcctgttttgcaaaagttaattatcagcacattgaagattttccttttttttcttttctttttttttttttttttgagtcaaagtcttgctctgttccccaggctagagtgcagtagcgcgatctcggctccacctcccgggttcaagtgattatcctgtttcagcctcccgagtagctgggactacaagcacatgccaccatgcccagctaatttttgtatttttggtagagacggggtttcacaatgttggccaggctggtcttgaactcctgacctcaggtgattcacccgcctcaccctcccaaagtgttgggattacaggcatgagccactgcgcccggccagcagtcttaaataacagaattcacacacacacacacacacacacacacacacacacacacgcactgtattatatttcatcttatactttaaaatgtttccttttttttcctcaaaagtacacattaagatcatgtttacaaataaagccttgtcatccaaagtgaaaaatccagatggcaagatttggatggggaaggtcttgagaaatctgcgaatggagttcacttttgcagacaggaaatgggccctaatatatggttctaaggacattccatttctgaaaatgtacatttccacccgcttttcctctccttccttcctccctccctccctccctctctctctctctctctctctctttctttctttctgacaaggtcttcctctgtcgctgacgctggagtgcaatggtgcgatctcggcccattgcaacctccgcctcctgggctcaagtgatcctcccccctcagcctcccaagtagctgggaccacaggcacacgccacggcacccagctaatttttgtattttttgtacagatgggttctcaccatgttgcctaggctgatcttgaactgctgggctcaagtgatcctcccgcctcagcctctcaaaagtgctgggattacaggcgtgagccaccgcacctggcctgcatccccatttctgacccttgaccatgttcaagtgggaaggggaagccggggaagggaggacgggctacctgagggctgcgggtagaggtgactcctgtgagctgtgagccctcagcccttgggcagagggaacagaacagaaacagaccccatctctgagccaccaagctcagactcgtgtggcaggagacagatcacacaacactatcaacaaaacaacacaggtcgcagtggctcacacctgtaatcccagcactttgggaagctgaggtgagaggattgcttaaccgcaggagttcgagaccagtctggccaacatagcgagaccccatctctcaaaaaaagaaaaaaattagctgggcctggtgatgcacacctgtagtcccagctacttgggaggctgaggtgggaggacagcttgaaccagagaggtcgaggctgcagtgagctatgattgtgccactgccactgcactctagtctgagcaatagagtgagaccctgtcttccaaaaaaaaaaaaaaagagagagagagagagaagaatataatcaaaagtttctaaattcccaaagtagtaacaaaagcagacccaaacaaaagtagagagaaaatcttcgaaacttaaaaggctatttaggctaaggagcccacccagtggtgaccacctagttctgggaggtttggggcagggccattagacaatggaaactcaggttattttggagacaatcaacttgctcccaaaaatgagctgcaagcaggtgcctgtgtgctcagcccagtctggagctcagagcctgcctgccccactgcaccatcaccagcccagctgaaccagggtcccaggcaagccgtacaggctctgcgttggccttggagagaaccgccgactcccccgagttgcctgagctcggcctgaagccagccctccccacgctggctcacaataaatgccttgacttcccgccaactcttcctcaaccattaagattcagctcaactgtcacgggctctgtgcagctgccctcgctgccccaccccacgcagactttgtgttccttctccactcctgcagcaccccttgcgacagcatgaataacccggctgtagtgatgtgagggtgacactcatcaccagtgtgtgagcccctccaaggccacatgtcctctttgtgtttccagagcccagggcccagcatgcggtagctacctagtatatgtttactgaatggagggatgaataaattcatgcacaaagaatagttttatttatttatttatttttgagacagagtcttgcttctgacacccaggctgtagcgcagtggtgcgatcttggctcattgcaacctctgcctcccaggttcaagcaattctcctgtctcagcctcccaagtagctgggattacaggcatgcgcgccaccacgcccggctaattttctatttttagtagagacgaggtttcaacatgttggccaggctggtctcgaactcgcgacctcaggtgatctgcctgccttggtcttccaaagtgctgggattacaggtatgagccaccgcgcctggccttatttgtttattttcataaacaaatttctgttgcccaggctggtctcaaactcctggcctcaagtgatcctcctgcctcagcctcccaaactgttgggattacaggcacaagccacagtgcctggcccagttctgtcctttgagttgacctggtcatccaggaggatgttctgaggaagtgtgaaatgataatattattctagcccacgctggatacagtggcagtctggaaggtgaaagaggttgggtttgaaatagatttattggccaagtgcagtggctcacacctgtaatcccagcactttgggaggccgaggcaggagaattgcttcagcctttaaacatggcgaaaccctgtccctattaaaaataaaaaagttcgatgggcgtggtggcattcacctgtagtcccagctactcaggagggtgaggcaggagaatcacttcagccctataggttgaggctgctttgtgctgtgatcatgccaatgcacgctagcctgggtgacacagtgagaccctgtttcaaaaacaaaaacaaaaacagaatagaggcctggagcttgagagggaactcaggatagaagatatagatttaagagtcggctggatgcagtggctcaaggctgtaatcccagcactttgggaggctagggtgggtgtatcacttgaggtcaggagttcgagaccagcctgaacaacatggcgaaaccccatctctaccaaaaataacaaaaactagctgggcatggtggcatgcgcctgtaatcccagctacttgggaggctaaggcaggagaatcacttgaacccgggaggtggaggttgcagttagccgagattgtaccactggattccagcctgggtgacacagtgagactccctctcaaaaaataaaaataaaaataaataaataaataaataaatagtgatacagatagatagatacataaattatatcattcactgggtagattgagaagagagctgtagagagaatctgagtgtaatagtcagggcaggctaactgctgtaagaaacagtgcccccacatctcagyggtataactcaaaagaagttttttccttcttatgacagtcaattcctgacatctggagcatgacctttcacaacattattccgggacccagtctccttccatctagtggctctgtcatcctcctagggccttggagtggtctgcttttgaccagctaatgggaggggagaggcagaataggatcctgtgaagacttctagggtcaggtctggaaatatcttttgctcacactccattggccagaacaagactgcctcagtgcagaggaagctgggaaatgtagtttagtagggtacccagaaggaaaagggaaacagtctctgccacactgaagcaacaccaaaatctgagggttggatgtaggaagaagcacctgcaaaagatagaaaagagcctttaagaggatcacctgaagccaggagtttgagaccagcctgggcagcatagcaagatcctatctgtacaaaaaataaaaataaaaaattagcctagggtggaggcatgcacatacagtcccagcaactcaggaggcttggggccaggagtttgaggctgcagtgagctttgattgggccactgcactccacttaagcctgagtgacagagcaaaaccctgtatccaaaaaaaaaaaaattaaccaggagaaaaatgacatttggagatcctgtctctaaagaaaaaaaaagctcactgcatagctcactgcagcctcagaaacaggcccaggactgaatcaaggccagcaaggtgctggggtgataagcgagcccgactccagcctggccaacacggtgaaaccccttctctactaaaaatacacaaattagctgggcatggtggcagacgcctgtggttccagctactcaggaggctgaggtaggaggatcacttgagcctggggcgtggaggttgtagtgggccaagattgtgccactgcactccagcctgggtgacagagcaagaccctgtctcaaaaaaaaaaaaaaaaaaaaaagtgagctggaggatgaggcctccctaaattttgtgccttgggtgtctcgatccgtcacgccagccccagtcccggcagtcaggtgcggcagagaaagcaaagggagaaggctgggaagatgcaagtgaatttagcgactagcagtccctgtgagcaactgtagcaagaagggtttccaatgaagaaaggaaggccctgggccaggcgcggtggctcatgcctgtaatcccagctctttgggaggcagaggcgggtggatcacctgaggtcgggagctcaagactagcctgaccaacatagagaaaccccgtctctactgaaaaaaaatacaaaattagccgggtgtggtggcgcatgcctgtaatcccagctattcgggaggctgaggcaggagaatcgcttgaccccgggaagcggaggttgcagtgagtcgagatcacgccattgcgctccagcctcggcaacaagagcgaaactccatcaaaaaaaaaaaaaaaaggaagaaagaaaggccctggcagttcttggacaggaacttgcctgaagtcccagtcccggtgactggtggtttccccactttctggttcagaagctgggctctaagctgtctgtgcccttaaagttccttggaaagagggaagggaagggaagtggatattaggtgagttcctactctgtttcatttgcagagttttctcattgattctcagttggacccatgaggtagatgttatgccattacattttttttttctttagagacagggtctctctctgtcactcaggctggactgcagtggcacgatcacggctcactgcagctttgaactcctgggctcaagtgatcctcccatctcagcctacaggtgtgcaccactgtacttagctaatttctttttcttttttctttttttgggagagatgggatctctgtatgtctctatgatgcccacactggtctcaaactcctggcctcaagcgattctcctgccttggcctcccaaagcacagggattacaggcatgagtcgctgtgcccagcctgttatgccgggtttttttgttttgttttgttttttgagacagagtctcgctctgtcgcccaggagtacagtggcatgatcttggctcactgcaagctccacctcccgggttcacaccattctcctgcctcagcctcccgagtagctgggactacaggcgcccaccaccacacccggctaattttttggttttttagtagagacggggtttcaccatgttagctgggatggtctcgatctcctgacctcgtgatctgcctgcctcagcctcccaaagtgctgggattacagtcgtgaaccactgcatccggcctgttatgccgttttttaaattaattaataaatttatttatttatcttgagacagagtctcactctgtcacccaggctggagtgcagtggcatgatctcgactcactgcaacctccacctccggggttcaagtgartctcatgcctcagcctcctgagcagctgggattacaggcggccgccaccatgcccggctaatttttgtatttttagtagagatggggtttcgccatgttggccaggctggtctcaaactcctgacctcaggtgatcaacctgcctctgcctcccaaagtgctgggattacaggcgtgagctcctgtgcccggccctgttatgccattttaaagctaaggaaactgaggcacagaaaaaggtaaaaaggtacttgagatcaaaaaggatggagttaggatttgaacccaggtccagggcccatgattttcccagcacaccatccaaaatgcctgcctgccctcaccagggagcacatgcttacattcacagccttggaccctgggttagggccaggagggctgggtgttgggtgagaacagggcctcgggctccttcactggctggggcagggcttctgagttccccatcagagcccctcctctgactttcagggcctgctgaggaatctgcaggcctggcagaggacaggagggaggcttggggagcctgggaagggccggctgacagcttgatgggccctccctccctccacagtcccacccccagcctggggcctctgggagccttggtcctgagcagccaacacaccagcccagacagctgcaagtcaccatggacgctgaaggtaaagggacactctctctgccatgtccctgcacccatccccccactgcctacccctgcccccaccctggcttgtctcagccccttgttgcctcctctggagtcatctctcctctggtcccgccatcgactcccttacctaccccatgtccctgcagccttgctcaacccccagaggccccttctcactcttctttctcctgtgttgagtccccaaggagctctggggaaggaaggggcttaagccctagaaaagggcagggtggcctggaggaggtggcgtctcctgggggcagtgggggccggaagtgggaggctggttgggggagcagcatggacttctgctctcgctggtagctcgggagaagcagagacaaagtcctgtcccttctgcagctgggtgggggagggggcttgagtcccgtgattccctgcctggagggagctgtatgcaaactgttggggtgatcagtcccaacccccaaccatgaagtccggtggcaacaaaggaatgagaaaagacaagttaagatttaaagcagccccagggggccagttgctaaagtgaaggctgcagagccctggttgcctgataatttattgagtacaatcttttgatctaagaagcagatggtacggggtgaaacggtgaaggtgggggtgtgtgcgtcatttgaaagatgtatagccgtggtggtttatgtgaatttcctttaagctcaaagcatatgtctaactactaagataatcttttttttttttttttttgagacggagtctcgctttcccccaggctggagtgcagtggcgtgatctcggctcactgcaagctccgcctcccgggttcatgccattctcctgcctcagcctcccgagtagctgggactacaggcgcccgccgccacgcctggctaattttttgtatttttagtagagacggggtttcaccatgttagccaggatggtctcatttcccaacctcgtgatccgcccgtctctgcctcccaaagtgctgggattacaggtgttagccaccgtgcccggccaactaagataatctttaacttattgggctgcagctggtgggagtgggttttacaaggagccaggatgtctggtcacattccaacgcttcaaggaagtgtttcagcccagagcattctgtgtaaagccgcagagcaggtcatgttcactggcctggggacacaatggcaataaggaggtgattctcctcagaggccccctatggtgttccataggtgtcctacacaggggtggctgactaaactggcgccccgtaaacccttccaccagcacaaacccaggggtccatgctctacgctcagaaggctccaccagggatggggctgtgtgaccatgggtgggtcctggcttctcagagtcccgttttcttccatctgtaaaatgacaataatagttccctgctctggcccgccacggtggctcacgcctgtaatcccagcactttgggaggctgaggtgggtggagcacttgaggtcaggtgtttgagaccagcctggccaacatggtgaaaccccgtctctactaaaagtacaaaaattagccgagtgtggtggtgcgcacctgtaatcccagctacatgggaggctgaggcaggagaattgcttgaaccccagtggcggaggttgcagtgagctgagaccaggcctcagcactccagcctgggcgacagagcgagactccatctcaaaaaaaaaggaaaataaatagttccctgctcagaaggttgtggggaggacagaggatgggaggcacaggtgcttagaccctcctccatgtttgaggtgcctgctggccccatacacccggtccctctggctccactgtggaaccagctctcgggggtcccatgcaggatgccacgccaaacacctttcaatctccattgtgtctttctcttttgaaacaacgccgacctggatgtgaatcctgactgccactcagcagcagtggaaaccctggcaagttttgtaacctgtagaagcccgtttccacatctggacaatggagttggtggcactggtctcacggggttgtaatgaagattaaataccttagcagatgtcaaggggtctcgacctgattccttcagagccaggattctttactgagggatcagggatgggctctgggggagttcatgaaccccagaatttgcaggtgaaattgtgtgtctttgtgagaacacggttacgcatttttctgggaaggagatccataattttcatcagatccagattcttttttttttttttttttttttgagacagagtctcrccctgttgtccaggctggagtgcagtggcatgatcttggctcgctgcaacctctgcctcccgggttcaagcgattctcctgcctcagcctcacgagtagctgggactacaggcataaaccaccatgcccggctaatttttgtatttttagtagagatggggtgtcaccatgttggccaggctagcagatccagattctttttttttttttttcgagatggagtctgactctgtcaccaggctggagtgcagtggcaggatctcggctcactgcaaccttcacctcccaggttcaagtgattatcttgcctcagcctcacgagtagctgggactacacgtgcttcaggcacttgctgccatgtccagctaattttgtagttttagtagagacagggtttcaccatgttggccaggatggtctcgatctcttgaccttgtgatctgcctcctcggcctcccaaagtgctgggattacaggtgtgagccaccgcacccggcctcttttgttttttagacggggtcttgttctgtcacccaggctggttggtgtgcagtaacataatcatagctcactgtttgtagcctccaacttctgggctcaagtggtcctcctgcctcagcctgtggagtagctgggactgcaggcgtgtgccaccacacctggctaattaaaataaatttttttttttttttagagatgggttcttgctgtgttgcccaggctggtctcaaactcccagcctcaagcgatcctccaacctcagcctcccaaaagtgttgggattacaggcatgagccaccgtgcctggctcaaatcttttcatatgtgaacatctcagcatgttttctttctttcttttttgagatggagtttcgctcttgttgcccagactggagtataatggcgtgatcttggctcactgcaacctctgcctcccaggttcaagtgattctcctgcctcactctcccaagtagctggggatacaggtgcccaccaccatgcccagctaatttttttgcatttttttttttagtagagatgggttttgccgtgctggccaggctggtcttgaactcctcacctcaggtgatccacccaccttggcctcccaaagtgctgggattacaggcgcaagtcactgcgcccagcctcatcatgtttttttcttaaaagataaagacttttctttttactacaaccacaatactattgtcaaaactaaactttaaaaatttccttggtgttatcaaacattcaatgtccagattccagtggtttcataaatagcctaatttgcttttagtttgtttgaattaggatctaagtaaaatctacactttgtgattggttagtatgttttaagagtctttgaaactttatttttttgattaaaaaatgtttaatttagagataggggtctcactatattgcacaggctggtctcaaatgccccaaagtgctgggattacaggtatgagccaccacacctgactgattctttttttttttttttgagatggaatctcactctgttgcccaggctggagtgcagtggcgcaacctcggctcactgcaacctccgcctcccagattcaagcgattctctcaccccagtctcccgagtagctgggattacaggcgtgcaccaccacacatggataaattttgtatttttttagtagagacagcgcttcaccatgttgtccaggctggtctcgaactcctgacctaaggtgatcttaggcccaccttggcctcccaaagtgctgggattacaggtgtgaccaccacgcccagccaatatgtggtcttatgagagcattggttcttttttttttttccctgaggcagggtctcaccctgttgcctaggccagagtgcagtagctccatcatagctcactgcagcctccaactcctggactcaagggatcctcccacttcagccttctgaatagctaggactacaggcrtgtgtcaccatgcccagctaatttttaaaattgtttttgtagagatgggttctcactatgctgcccaggctggtctcaaactcctggcctcaagcgatccttctgcctcggcctcccaaagtgttgggattacaggcatgagccaccgcccctggccgagcattgattcttgatcctcatgtgcatctgagtcacagagcagggtgggggctggctcttccccaacctggatccctggaaactacccccagagattctggttcactgggttggaatgggcctgagcatctgaaagtttgaaaagctccctgtgattctggtgtgcagcccaggcagaggccccactgtgtccacttctcttgaaaggagtggttcacaccaacacccccacttccctacctcccgtgcgctcctcgagcatgacaatgtggcttctgcccccgacacatggcacaaaaaccgctctggcacaggcctcacagttgctaagtgcagagccccatcctcagtcttccttctatttacttctgctcacctcccaaaaccctcttctccttcccaggtacccactcctgatgatgcttctctttttgttggacatgccctgtgggttctttatcttattattttattttagagaccgtggcttgctctgtcacccaggctggagtgcagtggtgcaatcacaggtcactgcagcctccaactcctggactcaagccgcagcctcccgagtagctggcgagtagctgggactacaggcgtgcacccccatgcccagctaactttttctttttttcttttgttttttgagacggagttttgctcttgttgcccaggctggagagcaatggcactatctcggcttactgcaacctctgcctcccaggttcaagcgattctcctgcctcagcctcctgagtagctgggatcacaggcgcccaccaccacgcctggctaatttttgtatttttagtagagacggggttttgctatgttggccccggagttcaatttttgtatttttagtagagacggggtttcaccgttttcaccaggatggtcttgatctcctgacctcgtgatcctcccgcctcggcctcccaaagcgctgggattacaggcgtgagccaccgcgcctggccacggcagcatctcttctgaactccagagccattccctaccaccctctgggcaccaccatccacatctcctgctgccgcctcagccttaacctctgcaaaaccaaatccgttctttctctcgagctctgcagaagctaagctgtttcaccaggccacgattcaggaaacgctttgggattcagcttctgttcttgtgaaatgggaagaatccctgtggtgagctccagatgagagcacaaaggggaacaggggtgcccgcggctggcacgccatggctggcacgccatggcactcagtggggtcaccgccccctcctgctgtcccacctccaccctgcctgctcttctcctggaatgactccttctgccagctctcagctacccaggccagaggcccaaggctcccacatctctttagctactaattctggtagatccccttttggaaatagccctcaaatctaccccagagctactgtcaaagttcagggctccatctcttttggtttttttgaaaatattttttcaaattaattatttgttggccgggcgcagtggctcacacctgtaatcccagcactttggaaggccgaggcaggtggatcacctgaggtcaagagttcaagaaccagcctgaccaacatggtgaaaccccatctctacaaaaatacaaaaattagccagggatgatgctgcatgcctgtaatcccagctactcgggaggctgaggcgggagaaccacttgaacccgggaggcagaggttgcagtgagttgagatcacaccattgcactccagcccaggcgacagtgagactccgtctcaaacaaaaaaaaattatttgtggaggcagggtcccactatgttgcccaggcctcaagtggccctcctgccttggcctcccatagcactgggattacaggtgacagccaccgcgcccagcctactttttgtctggccaagactacctcagccttcttttgcctcccaatctgtctccagttggtggctgaagtgacccttctggagcaaaaccataatcatatcactccctcttttaaaattctgtgatgggtcaggcatggtggatcacacttgtaatcccagcactttgggaggccgaggtgggaggactgcttgagcccaggagttcaagaccagcctgggcaacatagcgagaccccccgtctctacttaaaaataataaaataaaatgaaaagaaaattttttttgagatggagtttcgctcttgttgcctaggctggaatacaatggtgggatctcagctcacggcaacctccacctcccgggttcaaccgattctcctgcctcagcctcctgagtagttgggattacaggcatgtgccaccatgcccggctaattttgtatttttagtagagacggggtttcaccatgttggtcaggctggactcgaactcctgacctcaggtgatcggcccacctcggcctcccaaagtgctggaattacaggtgtgagccactgtgtccggccaataaaatgaaattttatgatggcttctgcgatctggccaaattcctcagctaaatagtttagttctttctccctgtggcctctcctcccaccatgtcacctgtgaatcccacactgcccccaccccgacactgtctgcaggtgaacagatcagttttctcagccccaaatgtcagccccaccccacacctctgcctggcaaacatcactcaccggtcctcagagacacctagtcatttattccatgagtccaccacacttgagaaacgcttcttttcttcgcgagcacgcctaccctgtgctagacagtgttcctaagggctttcaaacataaagtcttttgttttttgtttttgagacgcagtcttgctctgtcgcccaggctggagtgcggtggcacaatcttggctcactgcaacctccgcctcccaagttcaagcaattctctgcctcagcctcccgagtagctgggattacaggcgctcggctttttatttttttaattttttttattttttgtatttttagtagagacggggtttcaccatcttggccaggctggtcttgaactcctgacttcaagtggtccacttgcctcggcctcccaaagttctgggattataggcgtgagccactgtgcccagcctccaactcctggccttgtcttcctcccaccctggcttcccagagtgctgggattaacagacatgagcctccacacctggcaacttctttccatttttcactgattctctgacacatcctcattgagcacctgcactgtgtggggtgttaataattgctaggcatggaggcaacagcgtgggcagctctttctcttacttgtcaggctttagcctatgctgttgcaggactgtgccttggcctggaagccccttcccttatcctcatccccaatctcccccttcagctcttgttcctcttgcaggtcttcccttaaacatcacttcctcagcaggggcctcacagacacgcccggaggttagatcctggtccctctgtgcttcctgttcttcccccatcatcacagtctacggctgtttcctctcgatgggcaaagactgtgtctggccattgagttttctgctatatccaagtgcttcgyatactgaaccatataaatgtgctgcttttattggtcaaaacggccaaatattggcaattttatattggttagcttcatagtatgtgagctaggatacttatcccatcagagaggttgcgtagcacagtgaatcagagcccaggctctggggccgcacacctgaggtccagccctggctctgccacttgtcactaagtgattgtggactggagacaaccctcaggggccttgggttcctaatctgtgacagggatgacaataatgacctcctcgtgctgttataaaatacagaaatgtactaaaatacaaaaattggccaggcatggtggcacatgcctgtaatcccagctactcaggaggctgaggcaggagaactcaggaggcagaggctgcagtgagtctacttttattgccaaagctcgggggtccatcccttttccattgcatgccactgcactccagcctgggcaacaaagtgagactgtctcagaaaaaagaaaaagaaaaaaatgtttaaaagccaggagtttgagaccctgtctctattaaaaaaaaaaaaattaccttggcatggtggagcagctactcaggaggctgaggtgagaggaccacatgagcccgggagttcaaggctgcagtgagccatgattgcaccactgcattccactctgtctcaaaaagaaagaaagaaaaaagtcaagagaactggagctgaaaccatgaaaggtcagttttcagcaggagagtgatcaaagaaaaccagaactagacagtcgttaaaatagcaaaaacatattgcattccagactattgctgtaggggaagagtgaccttagatcagaactgggctgaactctacaccatgggggttatagccaacgagcagagttgggggcagtggatgggacattaccatgagaaagcactgggggttgggggtattctgacaagaccaacctaaagggattcttgctgagggcaggccaaggtggtcagacagcgcctgggggagagtggagaatgaggacccccatcagggatcgggggcaatcagatgtggaggatgagggactggctaagctgacttagcagtattcttgctaaaattggacgatgcagaggtgaacacggaagtccaaggcctaactggaaaagagctgagggaacctgagtgaggtttggctatagacagaacctctgagtgagcccatcaaagttactttatttatttgtttgtttattaatttatttaagacagagtctcactctgtcgcccaggctggagtacagtggtgctatctcggctcactgcaaactctgcctcctaggttcaagcaattctcgtgcctcagcctcccgaggagctgggattacaggcacatgccaccacacccagctaagttttgtgtttttagtagggacagggttttgccatgttggacaggctggtcttgaactcctgacctcaggctaattttttgtttgtttttattctctttttttttttttttgagactgagtttcgctcttgttggccaggctggagtgcaatggcgcgatattgactcactgcaacctctgcctcctgggttcaagcgattctcctgcctcagcctcccgagtagctgggactacaggcgcacaccaccatgcccagctaatttttgtatttttaggagagacggggtttcataatattggtcaggctggtctcaaactcctgatctcaggtgattcgcctgcctcagcctcccaaagtgctgggattacaggcgtgagccaccgcgcccagccttttgtttgtttttaaatttaactttttttttgagaccgaattgcactctgtcacccaggatggattgcaatggcgcaatctcagctcattgcaacctctgcctcctgggttcaagagattctcctgcctcagcctcccaagtagctgggattacaggcgcctgccaccacagctggttaatttttgtgtttttagtagagatgaggttttgccatgttggacaggctggtcttgaactcctgacctcaggtgatcaacccaccttggcctcccaaagtgctgggattacgggcatgagccaccatgcccggccttaacttttatcttaagttcaggggtacatgtgcaggtttattatataggtaaacttgtgtcatgggggttgtacacattatttagtcacccaggtattaagtttagtacccattagttatttttcctgatcctcttgagggaagagagagaccctctcatattgtttcatactcagaaaaggaaagagaagcgaaactaaaggcaggtagcctggtgcctaggaaccagaccggaaaccaaggaaccagacccgaaatcaggcctgggcgtgcctgacctaagcctggtagttaaaattcgacccctgacctagcaactgttgttatctatagattccagacattgtatggaaggacattgtgaaacctcccgttaggttctgtttcactctgaccaccggtgctcgcagcccctgtcacgtaccccctggcttgctcaatcacgaccctctcacgcggacccccttagagttgtgagccgttaaaaaggacagaagttgagcacctgaagagctcggattttaagacgctagcctgccaatgctcccagctgattaaagccactcccttcactatcttggtgtctgaggggttttgtccacagctcgtcttgctacacttgccctcctccaaacttccgccctccaataggctccagtatgtgttattcccctctatgtgtccatgtgttctcatcatttagctcccacttataagtgagaacacgcggtatttggttttctgttcctgcgtttgtttgctaaggataatggcctccagcgccatccatgtccctgcaaagaacgtaatctcattcttttttrtggctgcatagtattccacggtgtatgtgtaccacactttctttgtccagtctagcattgatgggcatttaggttgaatcatgtctttcctatggtgaatagtgctgtgatgtgtctttataacagaatggtttacattcctttgggtatatacccagtaatgggattgctgggtggaatggtatttctggtttttggtctttgagaaattgctgcactgtcctccacgatggtttaactaatttacactcccaccaacagtgtataagtgatcctttttctttgcaacctcgccagatctcggtggtcaactcctcccactccccaggcaatgctgatttgctctgtgcctatagttttgcctttcccaggatgctgcgggaatgggatcatacggccttttggatctggctccttttagttagactgatacatttgagacaggtccctattgttgtgtgtatcagtagttggtttcttctttttttgagatggattctcagtctgtggtccaggctggagtgcagcggcatgacctcagctcactgcaaactccgcctccctggttcaagtgattatcctgcctcagcctcccaagtagctgggattacaggcacatgccaccacgcccggctagtttttgtattttttcgtagagatgggatttcaccatgttggagaggctggtcttgaactcctgacctcgtgatctgcccaccttggcctcccaaagtgctggaattacggcgtgagccatggtgcccagcctgcatcacaggttgtttacccaatactcaccagttgcagaattcnnnnnnnnnnnnnnnnnnnngaattcaaatccattttttaaaaaatcagcctgaaaaaaaaagaaaaaaatcagtctggccaggcacggtggctcacgcctgtaatcccagcactttgggaggccaaggcgggaggatcacctgaggtcaggagtttgagagcagcctggccaaaatggcaaaaccctgtctctactaaaaatacaaaaattagctgggcgtggtggcgggcacctgtaatcccagctacttgggaggctgaggcagaagaatccctggaacccgcgggacggaggttgcagtgaggtgacatcaggccacttcactccagcctgggcaaaagagtgaagctctgcatcaaaaaaaaaaaaaaaaaaaaaaaaaaaaaatcagggtgggcacagtggctcactcctgtaatcccaggactttgagaggctgaggtgcgaggattgcttaagcctgggagttcaagacgaggctggggaatatagtgagacccccatctctacaacaaaaaatatacaaaaattagccgggcatggttggtgtgcgcctgtagtcccagttccttgggaagctgaggcgagaggattgcttaagcctgggcagttgaggctgcagtgagccatgatcgtgccactgcactgcacctagtttgaatggagtgggagtgggggattaggctctcctccctgccgtttgctcccaggccttttccgtagctggatgtgaccaacagagacagtgcccagcctcagtatagctagctcttagtggagggacaggagccatctggggcagatgtgggagagaatgtggcgaaggagagccgggtgcagtcaaggaggcttgtggctcggaggggaggtggggtgagtgagtggagactcagcagcttggctttggggaagtagacaagagagggccctctttggagagcggagcaagccaggatgtctggccttcacttccacttggaacagaagtgtgctgtgtgcgcgtgcttgtgcgtgtgcgtgcacgtgtgtgcgcgctaaatcaaacaccctcgctggctctgtgttcccctcaaggggaagccaactccacggatggcgggggtccattaggctgcaggtcttctccctgccgatagatggcgctgttgcaccgcgcctgggtttgcctctgcccgcagccatgcagggcccatcacgggctatgcctaccgcgcgaggggccttcaccatgtccactatccttatttatttatttatttatttattttttaagtgtgggtactggccgggcgcggtggctcacgcctgtaatcccagcactttgggaggccgaggcgggcggatcacgaagtcaggagattgagaccatcccagctaacacggtgaaaccccgtctctactaaaaacacaaaaaaattagccaggcgtggtggtgggcgcctgtagtcccagctactcgggaggctggggcaggagaatggcgtgaacccgggaggcggagcttgccgtgagccgagatcgcgccactgcaacagaacgagactatctccaaaaaaaaaaaaaaagtgtgggtatatagtaggtgtatatatttatggggtgcacattgataaaggcatgcaatgcataataatcacatcatgggctagatgcggtggctgacgccgagatcgcgcctctgcagtcgccaggccactgcaggcgccacagtggcgacagagcgagactccgtctcaaaaaaacaaataaataaataaatcaggttaggccgggcgcagtggctcacgcctgtaatcccagcacttgggaggcggaggcgggcgaatcacgaggtcaggagttccagaccagcctggccaacatggtgaaaccccgtctatactaaaaatacaaaatttagccgggtatggtggcaggcgcctgtaaccccagccactcgggaggctgaggcaggcgaatcgcttgaatccggaaggcggaggttgaagcgagccgagatcactccattgcactccagcctgggcaacaagagtgagattctgtctcaaaaaaaaaaaaaaaaaattacatcatagagaatggggtgtccatcccctcaagcatttatcctttctgttacaatccaattgcattcttttagttatttcgaaatgtacagttattattgactgtagtcaccctgttgtgctagcaaatagtaggtcttattcattctttctattttttttgtacccattaaccttccccacctccccatcatccttttttttgttttgagacggagtcttgctctgtcacccaggctggagtgcagtggcacgatctcagctcacttcaacctctgcctcctgggttcaagcgattctcctgcttcagcctcccgagtggctaggattacaggcctgcgccactatacttggctcatttttttcggggttttgccatgttggccaggctggtcttgaactcctgacctcaggtgatccacctgcctcagcctcccaaagtgctgggattacaagcatgagccactgtacccagccccatcatcctcattttatttattttttatttttattactatttttttaggtggagtcttgctctrtcacccaggctggagtgcagtggcgtgacctcggctcactgcaacctctgcttcccgggttcaagcaattctcttgcctcagcctcccgagtagctgggattgcaggcgcctgccaccacgcccggctaatttttgtatttttagtagagacaggagggttttaccattttggctaggctggtctcaaactcctgacctcaggtgatcctcccgccttggcctcccaaagtgctgggattacaggcgtgagccaccgcgcctggccagactgattttttttttaagtgaatttgaaagctgcaactggtgagtattggataaacaaactgtgatgggattgcaggtgtccacccccaagcctggctaatttttgtatttttagtagagaccatgttggccaggctggccttgaacccctgacctcaagtgatctgcctgccccagcctcccaaagtgtttgggattacagtcgtgagccaccgcacccggtcagaagtttaatttttttttttgagacggagtcttactctgtcaccccggctggagtgcagtggcctgatctcggctcactgcaagctccacctcccaggttcacgccattctcctgcctcagcctctggagtcgctgggactacaggcgcccgccaccaagcctggctaattttttcgtatttttagtagagacggggtttcaccatattagccagaatggtctcgatctcctgacctcgtgatccgcccgcctcggcctctcaaagtactgggattacaggcgtgagccaccgcgcccggcccagaagtttaaatttaactaggtgcccagtgatctcatcaagcccacagcactccctcaccctcgcccccacaacctcccttccccccacgccccccttcctcaccgcagtccctgcccctgggacccctagatcttgaggctgatgggccagttcccagtttcactggttgttaaatattttgacagtgacccctgacagcaggagaggcagccaaactcaacagctgttctctcttccccccaggcctggcgctgctgctgccgcccgtcaccctggcagccctggtggacagctggctccgagaggactgcccagggctcaactacgcagccttggtcagcggggcaggcccctcgcaggcggcgctgtgggccaaatcccctggggtactggcagggcagcctttcttcgatgccatatttacccaactcaactgccaagtctcctggttcctccccgagggatygaagctggtgccggtggccagagtggccgaggtccggggccctgccmactgcctgctgctgggggaacgggtggccctcaacacgstggcccgctgcagtggcattgccagtgctgccgccgctgcagtggaggccgccaggggggccggctggactgggcacgtggcaggcacgaggaagaccacgccaggcttccggctggtggagaagtatgggctcctggtgggcggggccgyctcgcacsgctacgacctgggagggctggtgatggtgaaggataaccatgtggtggccgccggtggcgtggagaaggtgctggtcctgcctgtccctggtccaaccccaccctcagcacacccctcccctcccctcccctytccagagcctccagccatgaccgggtgaacagccatggcctggagtcagcaacacaagactcttcccacctcagctcctccatctgagctgggctcagttgagctcatccagctaagctaaaggggagctgggcctgcttttctttttctggagatggggcctcagtctctccagtagctggatatacaggcatgctccaccccactggctaatttttgctttttttttttttttttttttttgagatggagtctcactctttcacccaggctggagtgaagtgatgcaatctcggctcactggaacctctgcctcctgggttcaagcaattctcctgcctccgcctcccgagtagctgggattacaggcgccagccaccatgcccggctaatttttgtattttttagtagagacagggattcaccatgttggccagactggtctcaaactcctgacctcaggtgatccacccacctcggcctcccaaagtgctgggattacaggagtgagccactgcacccagctgcctttttttttttttttttttttttgagatggggtctcactatgttgcccaggctggtctcaaacttctggactcaagtgatcctcccaccttggccacccaaagtgctgggattataggcataagccaccacgcctggttttggaattggttctttatctttgttctgctgctgcgtggcgtgatgttcaagagcaaaggacaacacaggggaagccagtgtcactggcaccacagccttgagcccatctctctagccctctgcaccttatttcccatctgtgaaatgcccttaaacaccccttctaattttaatattctgagtcaaattgagctcaggtccaaatgccaaatattgctgatattcatccactttttgacccacaaaagtggtcattttaacctacaataaaacatcctggctcagtggctcatacctgtaatcccagcactttgggaggcccagttggggggattacttaagtccaggagtctgagaccagcctgggccatatagcaagattctgtctctacaaaaaattaaaaaattagccatgcttgtgggcaagcccctgtagtcccagccacttgggaggctgaggtgggaggatcacttgatcccaggaggtggaggctgcagtgaactatgactgcactgaactccagcctgggcgacagagcgggaccctgactcaaaaacaaaacagtggccaggtgcggtggctcacgcctgtaatcccagcactttgggaggctgagatgggtggatcacgaggtcatgagttagagaccatcctggccaccatggtgaaacgtcgtctctattaaaaatacaaaaattagctgggcatggtggcacgcacctgtagtcccagctactcgggagactgaggtgggagaatcacttgatcccaggaggtagaggctgcagtgagctatcattgcaccactgcactccagcctgggcgacaggttgagaccctgtctcaaaaacaaaacaaagcaaaaacaaccccaaagtctggtttccttattaaccccaagttcatggtccacccgaagcttttcaaatgtcagtcccggctccccgcgccccagctgcagtgctgggccctatcgtcaccctcgccctcccggctccctgcgccccagtgccaggtgctgggcccagtcctcacccttgtcctcccggctgcccagcaggcggtgcgggcggccagacaggcggctgacttcgctctgaaggtggaagtggaatgcagcagcctgcaggaggccgtgcaggcagctgaggctggtgccgaccttgtcctgctggacaacttcaagccagaggtaaggtgggctctgcctccggggagggatctgtggtgggctcttacctccccttggcttgtgtcccgcaggagctgcaccccacggccaccgtgctgaaggcccagttcccgagtgtggctgtggaagccagtgggggcatcaccctggacaacctcccccagttctgcgggccgcacatagacgtcatctccatggggatgctgacccaggcggccccagcccttgatttctccctcaagctgtttgccaaagaggtggctccagtgcccaaaatccactagtcctaaaccggaagaggatgacaccggccatgggttaacgtggctcctcaggaccctctgggtcacacatctttagggtcagtggccaatggggcacatttggcactagcttgagcccaactctggctctgccacctgctgctcctgtgacctgtcagggctgacttcacctctgctcatctcagtttcctaatctgtaaaatgggtctaataaaggatcaaccacatggggttctgcggtgataatgagcacatagtgaggggtcagcaaatgtcagaagttacctgggacagccgggcacgatggctcacacctgtaatcccagcactttgggaggctgaggcgggaagatcacttgagttcaggagtttgagaccagcctggccaacatggtgaaaccccatctctaccaaaaatagaagaattagctgggtgtggtggcacgcgcctgtaatcccagctacttaggaggctgaggcaggagaatcgcttgaacccaggaagtggaggttgcagtgagctgatggtgccactgcactccagcctgggtgatagagcgagactctgtctccaaagaagaaacaaaggaaagaaagagagaaagagagagggagggagggagggagggaaaggaaggatggaaagaaaggaagaaaggcaggcaaaagccccagacaggccaaaaccttcatccttcatgcacccaacctgtaccaaacaccagcatggcctggctgtgagtgcacagcagatggaggtttgctgggcagagacactgggctggcctagacactgcctttggtgataccctaaaccaaaggggccagtcccacagtaagaaggagaccactactactcctgctgccctcctccccccaccttgcctagtttacaagacaggaggaaagagagaaagcaaaaagttagaaaacaaaacaaaacagaagtaagataaatagccagaagaccttggcgacaccacccggccctggtagttaaaaaaaagtaacaataataataatatcaacccctgacctaaactacttgtgttatctgtaaattccagacattgtatgaaaaagcattgcaaaactttctgctctgttagctgatgcgtgtagcccccagtcacgttccccgcttgcttgagatatcatgaccctttcacgtggaccccttagagttgtaagcctttaaaaaggccaagaatttctttttcagggatctcagctattaagatgcaagtctgccaatgctcctggccaaataaacctcttccttctttaatccggtgcctgaggagttttgtctgtggctcgtcctgctacaagaggacacagcccagaggtgccacctgcagctgccctgtcccctctaatcccagctccaccctgcctgctcccgtccttcctccagggggaacatggacacgctcagatgaaccccagcttcttatgcctgaactggggaaactgaagccccatgggaccaggggttccactgggcatcaagggaggaaagttgagccccggggtgatctgggaactgggatctgggatctgggcaggcattggggcctgacagagcagaagtgaggagagggtaccaggagctgcaaactcggtgcctccaggacctattcggataaaataaatgggtggaactggaataagacaaagtgggggtgcgctgtggccaactggaaaatgctcgttgcagccacagcgttccattaaaaaagcgaaaggaacctgcctgcctgagtcttaagctccccctaaacccagaaatgggttagccctccagtatcctccagctctgagagctggggcgggcactccattactgggggaacaggaaatggatcctgggcactctagggcaacacacgccctccttgcagggaaatggatttccaggcaggggagatgcatgggcagaggtggcttggattgtttgctgtaagatttgaagctgtgatcaggaggtggctaggagatgggctgggtccagaccacaaaatggtagatcggaggatttggactctgtctcatgagtgagctggaaatcaagctggaaaatcagataagcttattcgcagcttcaatccagtccgttgcagaaggatgcatttgagggggctagagcagctgcagggaggccaggaggagctgtggaagaggacttgagtgtgggtcatggccatggggtttggagagaagtgatacagtgtcttcagagcttcagaaggcagagggagttcgatggctcaaggcagttggaagagttgggtgtgactgagggggtggggaaatggggcatgcgtggcaggcaaggactcttatgcatcacctcccagtcccttgtccatctggctacacttcctctttgcctggccagcctaggaccaagctgggatcatttccccaggatgccccacagacaatggcaaatgtgcccatcatagcagtttgtttaatgaaaatgatatgctgttgtgagtacgggatgtgccagcaatgctggctactgcatgagacgggagctagcagggagcaccttcatccagggtgtgcaggtccccttccctcagttaatgctcgtgggggcgggcgttagcctctccacttaccgaagaggagactgaggctttataaagttaagagagctgcttagggtcactcatcaataaagtggtggaggccagtcatggtggctcacacctgtaatctcagcactttgggaggctgaggcaggaggatcacttgagcccaggagttcaagaccagcctgggcaacatagtgagactcaatttctatttttaaaaaattatccagctgtggtggtgcacacctgtagtcccagctactcaggagactggggtgagaggatcgcttaagcctgggcagttgaggctgcagtgagctgtgactgcaccactgcactccagcctgggtgacagaggccctgtctcaaacaaaaataaataaataaataaatatataaagtggtggagcagtttgaattgtgtcattcactcattcaatatttaactgagcatctactgtgtgccaggcactattctagacaatgaacatacaacgagtaaacagataaaaatctctgtcctcagggagtctgtatgttggggttggggtgggggcggggaagaatagacaatgaaaaaatacttaaggaaaatatgtagacaccaattgtcctgatggccacccctgatggccaccagagggcactgcaaccacgcggccctccgttcgtctctaattccagctccctttccggattccgaaggcaatagccaaggaggctatgaatacgcagcatagcatctgctcaagaatcaacgcgaggaggcattggcagcagttttttctccacccacttttccagcctcatcccctcatcagacccccatccaactgcccagggtacccctgtgacttttcaaagccccgtgtactccagattcaccagctactcacattcactcccagccacccatcccctcccaaatactgtctgggttacccaccaaccccatccatccgctcacctgatgcctgtcctcctcctcacccacccacccgcgcccctcgccccttccacctgctgtcctgcccaccggaaactggccaaattgtcccatagatttttttttttttttttttttttttggataaacacagaaattgacattcctggtcttaaagcttgaaacttaaatttgccttatctgagttccttccccaggaaactgaccctcaggcctcccagatagcatcaaggaactgaaactccttttctttacccccctctaattcctgttttcccacccacagctacatttgctccccactatataaacccccaattggagtttgttggagagatggatttgagacttatctcctgtctccttggcagatgtcatctgaataaagccttctttcctggcgatactcattgtcccgggatcccagatcagctttctgtgcagtaagcaatgggacctagactgaatccctggcgtttcggtaatacacccatccatcctgtccacccccacccatcctgtccacccccatctatcctgtccacccccgacccatcctgtccacccccgacccatcctatccacccccttgtgcttccatccactcatcactcttcccacccctccgcccacccaccatccgatgctacagaagcccagaactggggcactcaatctagaggtcaaagatggcaagaggtcaaaccagattgacagtgagtcacctcagtggatatgagttttagtgtgctgaggccgtgaaaggtaaaagcatttaaaaacagcaaggccaggcacggtggctcacgcctgtaatcccagcactctgggaggccaaggcaggtggatcacctgaggtcaggagttcaaagctagcctgaccaacatggggaaatcccttctctactaaaaatacaaacttagctgggcgtggtggcatgtgcctgtagtaccagctactgctacttgggaggctgaggcaggagaatcgctgaacccgggaggcggaggtttccatgagccgagatcacaccactgcactccaccccggggaacaagatcgaaactctgtctcaaaaaacaaaaacaaaaaacccacaaaaattagccaggcgtagtggcgggtgcctgtaacccagctacgcaggaagctgaggcacaagaatcacttgaacctcaaaggcagaggttgcagtgagccgagatcatgccactgcactccagcctgggcgacagagtgagactctgtcccaaaaaaaacccagagcaaacaaacaaaaaacacaacggcgagacattcttagcaaaccaactatctgcaaacaattcaacgtcggatctttaaaaaaatcccgctgtggcattatgctgcggacacatacattaatttatggctagcccttcaagacaaccaggtgggtaaaattatgtaaatgttcaccgcctctatactttgttccaatgacttcctgagtaattgattgttttgccaattactcagcaacatttaagacctgcttccggaggccctaagtagctcagcattctaagaccgaagtactgaagaaaatctgcctgtgtggctgtgaataacatctccatccgtcactgtgcacatcagatttaggccagataacgcaggctttatttatttcaggtacgccttgcgcttcagatcatgggactctagtatagcacccccagaaaattatcaagggcaaaaaaatcataatacatacctctagttcagtgggtccttggataacctctttcctctctcctagttcttcagctaaaagattcaggagccttagcaacaagaaggagctatcccacaagttgcattattctagatattcggacacttttttttttttttaagcaggagtcttgctatgttgcacaggctggtcctgaactcctgtccttaagtgattctcttgccttggccttccaagtaactgggattacagcggtgagccaccgtgccagggttttggatgctttttttttttttttttgagacagagtctctcttgtcgccctggctggagtgcaatggtgtgatcttggctcactgcaacctctgcctcccgggttcaaacaattcttctcccttggcctcccaagtagctgggattacaggtgcgtgccactacactcagctaatttttgtatttctagtagagatggggttttaccatgttggccaggctggtctcgtactcctgatctcaggtgatccgcccaccacagcctcccaaagtactggggttacaagcgtgagccatcgcgcctggccggatactttttaaccaaaggaaaaagcaagcatctttattggaataatatatcaatatatgcaggtaatcagacaataccagtcagacaacactgacttctttttttttttttttgagaaaggaaggaaggaaggcagaaaggaaggaaggaaggagggaaggccggaggtggtggctcatacttataatcccagcactttttgaagcccagaagggagatcacttgaggccaggagtttgagaccagcctgggcaatatagagagaccccatcttgacaaaaaatttaaaaattagccaggcatgataatttgcacctgtagttccagctacccaggaggctgaggcaggagaattgctggagcccaggagtttgaggctgcaaccagccgtgactgcaccactgcactccagcctgggcaacagagagataccctgtctcgaaaataataaataaaggccgagtgtggtggctcacacctgtcatcccagcactttgggaggccgaggcaggcagatcacctgaagtcaggacttcaagaccagcctggccataatggtgaaaccccgtctctactaaaaatacaaaaattagccaggcatgatggcaggcgcctgtaatcccagctacttgggaggccaagacaggagaatcgcttgaacccgggaggcggaggttgcagtgagccaaggtcgtgccattgcactccagcctggagaacaacagcgagacttcgtctcaaaataataataaataaataaataaataaatatgtaaaaagtcccttaactgaggccaggcgcagtggctcatgcctgtaatcccaacacttcgggaagccaaggagggtggatcacctgaggtcaggagttcaagaccagcctgaccaacatggagaaaccccatctctactaaaaatacaaaattagctgggtgtggtggcgcatgcctgtaatcccagctactcaggaggctgagagaggagaatcgcttgaaccctggaggtggaggttgctgtgagccaagatcacaccattgcactccagcctgggcaacaagagcaaaacttcatctcaaaaaagccccttaactataatctaagaaacaaaaaatatttaatttttattttttgcatga

SEQ ID NO: 94972 - DNA, 13255 bp, Homo sapiens
ggctcatggttccacatcctgtacaggaagcatgatgctggcatctgctcagtttctagggaggcctcaggaaacttccaatcacggtagaaggcaaaggggaagagaagcatctcacatggtgggagcaggagcaagggatgggaagaggtgctacatacttttaaacaaccagatctcacaagaactcactatcacgagaacagcaccaaggggacggtgttaaatcactgaggagaaaaccaccccccatgatctcatcacctctcaccaggccttactcccaaaactgggcattacaattcaacatgagatttgattgggacacagatccaaatcatatcaacatgtaagatcagtcttgaatttaaaagctgttagaattgtccaaattccatactatcatatggtggtttagggaaatattattaataacccactgcccactcttcccaatctgatttcatcacacactatgggatgttcaaatatatctgtacactcctgttcacttgccatgttccatcacatccctcactcccacaaacagtcactccttggccacacctggggcctatagggatggtgatttgaggtatggtatacacttgggaagacagattcagaagaaagatgtgtacaagcccttgtaacaggctttcagccatgcgtcctaggtacccagatgtgacctagaagttggaggttgggggcagttgcaggttcctggtgggcccgttcctttgttcccagcatgcctaccccagtaaggaggggtgtagacagagaagtgtcacatgaggtgccctaaagtatagaatgcaaggcaggtgcatctcttatccaagtctaagggcagtactttctccagcatccttgtactggtcacattatcttgggacctttacccttctaagggaagccctgactgttagaactaaggactgtttatgctgatgttcccgaagcttccaataagatggctccctcactcaactgttacatttttaatctccccctaaaggcctgtctgttgcagccatcttcctccaagacatagccaagagccagtttatgtatgtgtgagaaggaagagtaagttgggaaatttacctttcttacaggttaaacattatgaattgttaaatatcaaacactaaactcttttcaaatttctttaggttatattttaccattgcttctccaccagtgtgaaaaagaataacttcttttatcattgaggctagaaaaggagtaaaataatacaatgtgggcaaagaaaaataagaaccctgcttcttctgactgcaagggaaagttgagcaggagtccatcagagcaagcaaggggtagcagtgagagcattatgctgtgagctccatcctggggaggaggaaagtatttggattatcaatcaaaacactttgacggtacaaggactcttaccccactctctttattgacttctggaaaaggctacctcaccaccttttgcaaaccacagtgggtacagctatatcaaagcagaggtaaatgtgtagcaaggttagcagagacagacagcctgagtacacttattagacttaccttccccttagctctttgattgcaaagttagggccccagcaccctgaattctggtagattcagactactagtaagtagtctggtaccactgatatatagacttctgctgccatcaattaatatgcatggctaaaacgaccattgggtttgttctatttgtcatcttggtcattcagcaacatttgatgcagtcaagcacttcctgctccttgaaaccctttgttcacttgactttcaggataccactctctctgggtttatctcctactttactagcttctttgagtcttttttttgtctgttccttcctgtcttcccaacctataaacactgttgtgccccatggctcaatcctcaggcttcttccttatttttgctctgtgttatctaatctcttggcctgacagatcatgtaaatgtgatgattcccaggtcggaatcatatgtctatctgcttactcaagagtttatttgaaagtctgttattaatgtaaaattgaatattgccaatccactaacataattgggtacttaaacatagggttttcaattattgatagaatgagcagtcaaaattgagaaaggatagatgaaacagcccaatgaacaatttatgaataccaggaacattgtaccccaaaacttcaaagcacagattctttcatgatacacatggaatatttaggaaaattaatggtgttctaggccattataataacttcaacaaatttcaaagaattaataccaagtgcaacttattttctgaccacgatgcatatagttagcaatcaattttaaaaatatctagaaaactctgtttgcaaattaaaatcatatagaaataggacatatttacaactgaacaatcattgaagcagtatttatcaaaacttatggtatacagtcaatgccttacagctgaaaattaataaattaagtattcaacctctttagttagaaatagaacctaaataaatctttaaaagcagaagaaaggaaataataggaataagagcagaaatggcgagctaccataaagggtatgaacaaatcaaatacagtctctttaaaaatgatatgtttcttccaaataggcaaaattctggaaaaaaaaatcagggaagaaaagttataaatgaatactttttaagaaggcaaagtgtggaatacctacacatggaggagagattaagaatattatgatcagtttcataccaaataaaccctgaaaactgagataagatgggtaaattcctagacaactataactttccaaaatttactcacaaataagtaagaaaattgaatagtccatatccattaataaaatcaaaccagcaaaaaatgctggttttactggcattattatgaaatattcaaaaggcatgttattctaattttaaactattcctaaaatagagaaaaaagagtagactctcttttttatttactgaggctggcataacttacataccaaaatctgacagtgatagtacaaaaaggaaaagctatagtccaaaatctcttaagaacataaacatagaaatgctaaattattaaccagccaattccagacatggttagataatgttttcatgaccaagttgcatttatctaaaaatttcaaaattagattaacactggcaaattaacaaatgtaattcactgcattaacagatgaaagagaaaaatgatttggtcaccttaatgactttagagaaagcattgatgattttcaacaaagcaagaaacaaaattgtcattatttgccaattatataattatgtgcatagacaacccaaaaaattctactgttattaaagtaaatgtgcatagtatttctacacatatgcaaaaattagctagaaaatatcattttaaatatctatttataatgtcaagaatatataaactatctagtaataaacttaagaaaacatataaaagacttttacggataaaattttacttttattgaaaagtcttaaaatatacaaataagtgaactgtaccattttcatcgatagaataaccaatatcataaaattgcccgttttcgataaagggaaatttgaaaaatttgccctataagatataaaattatataaagctacagcaattaacaactttgtattggctcaggaacagataagtaaaccaatagaacagcaagagagtcttgcaataaatccattttatgtggaaacctgatatatgagaaaactgacattgcagattagtgaggcaatgacagattagttaataaaaggcactgggacaatgggttcttcatggaacaaaaaatgaaattggacccttacttcatgccccacacaaaaatcaatttcaggtagttttaaagcatgtgaaaagaaaattataaaactttaaaaacagaagataggaaaattcctttatgaccttgggatagtcaggatttcttaaataagatatagaaattcaatatgtgaactaaaaacaatcaattcgactacatggaatttttttttaacttctgtttaccaaaagacacaatcaagagagtaaaattagactctagaagctggcaaaaaaaaaacaaacttgctacatatatataaaacaataaatttagtatcccaaatgaacagtagaaaaatatgttggtaattatggatacaatgagaactcttataaacactttgttgggttataaattggtacagcctctttggaaaactggcattacatagtgaatttgaacattcccattatttattacccagtatttcctctcctcctagatatagccaaaggaaatttgtacctgtgtatgaggaggcatatacaagaatatttatagtaacaaaacctagaaataatccactctgcatttacagtagaaaggataaattgtgatgtattcaaaatatggaataatacacagctgtaaaaatgaatgaacaacagaaatatacattaacaggaatggttttcaaagaataattttgaatttaaaaagaaagtcattgaggtagtatataattacatatataaaaatgcaaataaatagcaaaataagacatatattttcagggatgtatacacatatagtaaaattataaagtaagcaaacgaaatgaatattataaaattcaaaatggaggctacctcaggaaggtgagaagagtaggtagcacgatggatagggcaacacagctgggcttctgttatacaagtcatgttctatttctaaagctgagtgaaaggtacatttttaaactgtagatatatatttggatttgcttcatgtgtttcatcataaaagaaaaaatgtacatgaatgtcttagaaaatcttgatcaagatgtcattttatatctgcactgtcatattcattgcaacattatccacactagccaagaagtggaatcagagtgtccactggcagataaatgcataaagaaaatgtgtgtgtgtgtgtgtgtgtgtgtgtgtgtgtgtgtgtatgtgcgtgtatcagtgtaatactacttacccttaaaaaagaagaaaatcctgtcttttgtaacaacatggatgaacctagaggacattatgttaactgaaataagccaggcacagaaagacgaaaactgcatgaactcacttatactgtatataggatctaacaaagttgaactcagaggccgggcgcggtggctcacgcctgtaatcccagcactttgggaggccgaggcgggtggatcatgaggtcaggagatcgagaccatcctggctaacaaggtgaaaccccgtctctactaaaaatacaaaaaattagccgggcgcggtggcgggcgcctgtagtcccagctactcgggaggctgaggcaggagaatggcgtgaacccgggaggcggagcttgcagtgagccgagattgcgccactgcagtccgcagtccggcctgggcgacagagcgagactctgtctcaaaaaaaaaaaaaaaaaaaaaaagttgaactcagaaacggagaggagaatggtagttaccaagggctgagaggaggtggaaggttggggagatattggctaaaaaatacaaaatttctggctggtatggtggctcacacctgtaatcccagcagtttgggaggccgaggcgggggaatcacctgaggtcaggagttcaagaccagtctgaccaacatggagaaaccctgtctctactaaaaatacaaaaattagccgggcgtggtggcccatgcctataatcccagctacttgggacgctgaggcaggagaatcgcttgaacccgggaggcggaggttgcggtgagccgagatcacaccattgcactccagcctgggcaacaagagagaaattccgtctcaaaaaaaagaaaagaatacaaaatttctttagctagggagaataagtttaagagagctattgtagagacactgaccttcagcgcctcggctccagcgccatggcgccctccaggaagttcttcgttgkggggaactggaagatgaacgggcgaaagcagagtctgcgggagctcgtccgcactctgaacgcggccaaggtgccggccgacaccgaggtggtttrtactccgcctactgcctatatcgacttcgcccggcagaagctagatcccaagattgctgtggctgcgcagaactgctacaaagtgactaatgsggcttttactggggagatcagccctggcatgatcaaagactgcagasccacgtgggtggtcctggggcactcagagagaaggcatgtctttggggastcagatgagctgattgggcagaaagtggcccatgctctggcagaggsactcrgagtaatcgcctgcactggggagaagctagatgaaagggaagctggcatcactgagaaggttgttttckagcagacaaaggtcatcgcagataacrtgaaggactggagcaaggtcgtcctggcctatgagcctgtgtgggccrttggtactggcaagactgcaacaccccaacaggaccaggaagtacacgacaagctcygaggatggcttaagtccaacgtctctgatgcggtggctcagagcacccgtatcatttatggaggctctrtgactggggcaacctgcaaggagctggccagccagcctggcgtggatggcttccttgtgggtggtgcttccctcaagcccgaattcgtggacatcatcaatgccaaacaatgagccccatccatcttccctacccttcctgccaagccagggactaagcagcccagaagcccagtaactgcccttcccctgcacatgcttctgatggtgtcatctgctccttcctgtggcctcatccaaactgtaccttcctttactgtttatatcttcaccctgtaatggttgggaccaggccaatcccttctccacttactataatggttggaactaaatgtcaccaaggtggcttctccttggctgagagatggaaggggtgggatttgctcctgggttccctaggccctagtgagggcagaagagaaaccatcctctcccttcttacactgtgaggccaagatcccctcagaaggcaggagtgctgccctctcccatggtgcccgtgcctctgtgctgtgtatgtgaaccacccacgtgagggaataaacctggcactaggtcttgtgaaaaaaaaaaaaaaaaagagagagctattgtacaacttggtgaaaataataactttaaaaacaatatattatattcttgaaagtcacaaagaaaatagattttaactgttcttatgaaaaaaatgataaaatgtaaggtaatgtgtatgtgaattagctggatttaaccatttcacgatgtatacatatttcaaaacatcatgttttatatgataactgtatatatatgtttttgtcaatgaagaaaataaatttaaaagaggaaaataacaaaacaagaaaaaaaggatataatcagacaaaatgttaaaagtttatgtgttagaggtttactagggccttgcagataattgtaaaaaattgtagaaacaacataaacattcatcattagagatttgattaaaagataagcaaatccatagaaacagaaagcagagcatagatgagtaggagctgggggaagggagaaatgggaaatgactgctaatcagtgcagcatttcttttgggaatgatgaaaatattttaaaattagattgttgtgatagttgcacaatatattaaaaccattgagttgtacaaaatgacaatcaaattgggtgtggaagagacaactttaaaagatagagggagttggaaatttgcttctttaagaaaagtaaaacgtaaaattgtaaaaagcacatacatgtagtttatgcaggaatgaaaggttgtaatttaacccagcagtccccaacctttttgtcattaggagctggtttcatggaagacaatttttccatggatgggggcaggggatggggagtttcaggatgaaactcttccacctcacatcatcaggcattagattctcataaaagacatgaaacctagatccctcacatgcatagtttacaatagtgttctctcttttatgagaatctaatgcccaggctgatctgaccacagtttctcaggcactctcacccagcgctcccttactgctctgctaccaggttcctaacaggccacagactgtatagtcggcggcccagcggagrkgggggtggggrggtgggggctgctttaatcagtacatccatatacaaatgaaagtcttgaatttatattaaaaatctaggcaaaacattgtgcatgtatatgttttaagttaaaatccctaatatacttaaaagtctgtttctatgatttcctgcctcaccaaactttttcaagtaaccaaccaaatattaataatgagcacattagatagaaggcttctatggtatttcttcactcagttaaactaaaatttagtttcttttctttttccgttacccagtgaatggcagcttgtgaaaaaacaaacatgaatagcttatagagataatgcctgtgtatagtgagagtaaaaattttaagtctgttaacaaatatgatttttgtgaatgaatacctaacttttgaatatcatgtctatttaatcgatgtttagtattgtgacagagactgttttacttttctcagaatgaaggctagaaaagattttccaattgccctgtaactggatatggccatatgactaaattttggccactgaaatatgagtagaaatggtgctaaacaacgtttaggcttgttaaaaaaaaaaatacaaaaaccaagaaacacaaaaaaaaaactaccctaaaatcctcccaggtaagatcttccatgatacactctccatccagctgactcaaatggaaatgaccgtaagtggaacctgagagccaaggtgaaggcagtggagctctgaaatggaaggagccttagtcactgtaacataagttgcaaaagaacctacctgaccagatcaccagtactggaggatgccatgcgcaataaataaacttcactggcataagatatttcagagatgttggggtttacctgtaacagccactagaatttaccctaatgaatatcagtaaagcaatttaagaaaaggggaaaaggagagagagagggacagagagagagagagaatacggctacagttggatgtctttttcttctccctagataacaggcccagctaattccatatacaccaaatggctgcgcagtgccaaagaaggaagagggcaactctctctctctctcatttgttcccccaaaatctttatgagctgtggtgtagtctgtgaccaaagttgtgttgttactggtggccccatcaaccaaccagtaataggatataaggctattagaggcttgaattgaatcagcatgcattcattgattcaaccaatatttaatgagtaactattacatgtcaaaattgtaagtttctgaggctacagtattgtaaaagtgcttttcaaagtggaaatacccagaatacaaatatttcattagcattagtaatgtcaaaatyattgatcatattgagtctagaattcattaatctaaatagcccaccacactcttgggagaaaagatgatttctttgttttgtttagctacagattgaattttgcttttccccttctcattagaaatagttctaattttttctgaaatatgactgagactgttcctactcataaaatactcatgatccttactgtatttcttgcccttgatcaaggtggggtcatgtggctaattcctgctagtggataattaaagaacgtctacatcttttctgatctgaggcaaataagagtagaggtgccgtctctatacactctctttctttcttctagccaagaggctggaagcagaggattctaagatttccaagttgcaagatggaaatagccttgtccccaagtcacggcttagataagagtcaggtaggattgcctcatgacccacattgaactgagccatgtgcaaggaattgattctattaatccaaggagaatggactttatttaatgtagcagtgtcctgataaatacataagactgagtgatataccaagacaaaggaacagtaaaagatgaataagatttattaaaatactagaaaaaatctatgaaaaaagtacaatctcaaccctacttgtatactgctgaagaagcctttaattgaaattggcaagtcaaagtgcaaactccagaccctttaaacacctcaggagcctgctcttcctttccttatggctgattacaaaattgctgcacatggaagctgaaatagaggggtttaaattgtcacatgcaaaggccttatttatttatgaggtctctgtggaagtttgaaaactcagccctgaaataattggaaaatttttgtgagttaatgcggaattactaatgatttctttttaacacaagggaactgacataactgcaaaagagaattaacatrctttattaatattgctaatataatgatcattaaatattatcaacacaccagcagtgatatgtgtagtgatatgttacaaagagagccaatgagaaaaaataaaggccttgctcaatttctgatttaaaagrctatagctattccctagtgcaggaatttttgtattatatttgtaaaagaaatctgttcttttctccaagtctgctaaagatgaaggaagccaagagaagggtacattgaatgcaaacagctactttcctcaccaagaacattgaatgctagtggagaaaatattgaaaatatgatgctgcatgttaataaaacaagtttctctgcttcccttttttgtaaaacacagtttacctagagcagcataggcttgaagagtttcttctgaatactcttactatttcttaaaatttctctgtcaataatcaacaaagcctcactacttattcataaagagccatgtttttttaaattatatgcattctctaagaattatgctgatatcactctattgatagctgcatttataagccaattcaaaatccaaaatatttgcctcagatgttaactacaaggagtacatattcatagagatatgttgctgcggcataattttctctttcttattaatcacctttttgagcaccttgtttgctagactttagttttatttctgtattttgtaatcaacaaaatatacttcctaaagaaaatagcttgtgccatttactgcatggctgaaagttccagtgcaagaaagcacagctggttggttccttcaaccaactcccactgtgatatgataaaatatatctaaatatgtaatcataatctccagaggtaagctagggctggcttcagacttctaaaaatctcatcatggcaacctaggaaaggactgatttcagcttagaaatttgaatacatttcttaataatcacaagcagtactgcttcaattgtccctaagaccaagttcctattactctgcactgatatgccaagtgaaaataagctattgatgtattcagagaaacaagaaatccacagttgtatccttaaatattaattcaccttagaaatgttgatacagtatacttagacaacaaaatatataccactgaggtttgcatcatatggtgtaaacagcatcatattggacaataatttaaaatcgcagaattataaatatttagatctagaaaatatctttcaaaccaccataattcaatggctttattttcagaggaagaaacagagctcaggagaatcaagtgacttatttaagattgatcacacagctagttcaagacagagttgggactaaaaactcaggttttttgactagtcagacatttctattgtacatacagtgcacaaggttgaccagatgagtcatgagtgaacagatgccagtacactacccaaatgaaccatgaggacacctgtagccacagctatttgcattgatttgctccgggtatttggagaggaacttgaaaatgcacgactttgtcaaaactggctgacttatattcaaaatgatgaacgtttatcaagactttactatgtaaagtgacagaatcggggaatttaggcactttatatcttagtatccaataaaaccctttgggatattcccatgggagctacaccatgtcctcggcatattttagtttgcatatattcttctgtactatcagctgataggactaaaaacaaaaggagcatttcaatttttgacaggggagatggaggagatggcaaagggatcacaggcaaagagaccagatctcttcatcggcacctaaaccgaatgacctgtccttttacgttttttcctcctttctttccccttttcctttcccccaccttcctccctcctttcttcctgcaaggcttgtcagaaatagatagaggtctagggtatttcaaaaagagacagaggtctgggatatttccttttttaaattttttttccttttttcttgaggcttcaggtatatgaaaataaaaagatgacaaatcaggatacatatattaaatgttttcgtttaacaaaccgacaattttaatacacacacaaagcaatataattgtactattcataagataattatgatttttaaaagaattatttcactgcacaatagacaccatgatgaaacagtgcatacatttgaaagtgtagaatggatgccttctttctaacctgcatttctaacctctttctaaactgtctgtgtaattggatgggagaagccagaagtttaaatttgactacttctgtgcacatgctgaccaagtacctttctctcccttgcttctgtctttgcctttcttctattgccaaaccccagggatggcagaatgtaggagtctctggaagcacaaaatcaggaccaccctcaggccctctatttaggtttcagtgtcagcgtagggctggacaggataggggacattagttggtcaactgcaaactaaagaggagggtttgctcaaggaagcatgaacaactgtttcaagggaacaaaatctaagagcaaactaggtcaaaaagtagaagaggtccacaatactttgttttcaaggccacacccaaagttcaagacaaagcttgaatgaagggtcaaggagtgtgagtagcaggaaggcaggtcagat

SEQ ID NO: 94973 - DNA, 15061 bp, Homo sapiens
ggcgtgatccaccgcgcccggctagaaaatatatttaaaatgcatagcacaaggccgggcccagtggctcatgcctgtaatcccagcactatgggaggctgaggcgggcagatcgagaccagcctggccaacatagtgaaaccccatctctactaaaaatacaaaaattagccaggcatagtggtgcgcacctgtagttcccactacttgggaggctgaggcaggagaattactcgaactcgggaggcggagactgtggtgaaccgagattgtgccactgcactctagcctgagcaacagagcgagactccatctcaaaaaaaaaaaaaaatgcatagcacagtgtcaggttcagaagtaaccaatagtggcacactctaaaaagaaatgtctttgaaactcatcttgataaaaccacattatcttcttgctatcaaagtagaaattgattagtttgtggtttaaaaatcatttctaaatattaaatgaaaatgagtgtctttacatttgaacaaagcaagcagtattaaaattacctctacaagtagctttccgaaagttttcctttccagggcatacttggtagcttcatccaaagctctttgtgctaatccaacagcaccagcagctacctagtattttaagatattataaagcaaaagttcatgttatctttaaaacacacaatatctgcctaagtgtctatgttagggagtgtacaaagagaaggtgatgtacagcaacaagaaactggtggggaacagggaataggcacgtaagtttatattatttgttaattaaaggtagtaagaggcatttgttaggcatagtatcatactctagaaaaaagtcattgcttttgtttaacaagagaaatcttactaggggaaatgttcttaatgagtaaaaacagaaaatgagtacatattaacaggatgatcatatttagggtggactgcctctctaaatctagcaccaactacagtaattttgcagttgctaaaataatttctataatgtatagtaagaaaacttgaagaattatttaaaaaattaagaaaagtaacaatatggtcaggcgcggtggctcacgcctgtaatcccagcactttgggaggccgaggtaggcagatcacgaggtcaagagatcgagaccatcctggccaacatcatgaaaccccatctctactaaaaatacaaaaattagctgggcagagtggtgtgcacctgtagtcccagctactcatgaggctaaggcaggagaatctcttgaacccaggacgtgaaggttgcaatgagctgagattgcaccactgcactccatcctggtgacagagtgagactctgtctcaaaaaaaaaaaaaaaaaagaaagaaaagtaacagtatttttcctatatccttaataaaataagcagatattaaaaagagaaacacactgaacatacaattttaaagtaaaaatacttatttaatgtaataaataaaagatcctataaagattatgaacccatattacttactacaggtctggttttatcaaaagctcccattgcaactttgaaaccagctccgtcaccaattaaaacattttctttaggcactttcacatcttcgaagacaattcctctagtatctgaacatcgctggcccatgtttaattcctaataagaaaattgatatattttaaggaattttttttgagccagcatcaatttttgctttaatcactgtttcatgactttctgcaattacctaaaacagggatcaacaaactgtagtctgcaatgcctgttttgcaaagaaagcctgattggaatacagtcacgcctatttgttcatatatcatctacagttactttcttgctacaatggcagaactgagtagttgtgacagagatatggcctgcaaagcctgaaatatttataatttggatctttacaaaaaaatttgccaaccataatctaaaacaatgtttcacaaattttgaaaccaacactagtctaaaggtctacaagtacatcttatcaacaaagacaaatctcattatatgtttgaaagctatctattttaccatgtcagaaaaaacatttagtaaacacaatctgatttgagacctttaatcttaatagagctagtaaaataatctactgaataaaaattgattttgttttcctttgactcttgttaaaattaggtttactgaggtataatttacatgtagaaaagtcaccatttttatgtatacatttctaatagctctgacaaatgtatatgtgtgtaaccaccaccatgctcaagatacagagtactttagaaccccaaaaagttaccttgttctccctttatagtcaatttccttattctacacttatcccctggcaaccactgtgtgatttctctccgcgtagtctttccttttccagaatgtcatttaagtgaaataataaagtccgctttctgtgtctgacttttcacttagtatagtgcttctgagattcatccatgttgctgcatgatcaataattcatttattttactgctaagtagtatcccactcttggatgtaccatatatccattatcttttcactagttgacggatactcccctcctttttagcaatcattaataaaattacaataaacatttgtatataggtctttattttcatttctcttgggtatttatttaagggcactggttatgtgataagtgtatgtttgactttataagaaactactaaactagctacattccctcaactttttgttttaaaaattttcaaaccaatggaggagttgtaacaggcatgtaagtacttatacacccttcatctataatagattcaccaattgttaacattttgatacatttgctttattttttatttctctttctctttgtatatgactattagtgttatgctaaatcatgagaggaagttgcagacataactcttaataaggaaaaaaacttgatctcatgtttaataagcagaataagaaacaggagcaatggaaacaaagagctataaactaaccctttaatttgctggttttaatagtctgcttctgagtttgaagaaataataacgatagtttgacctagaaagaagccaacatccctttattttgtctttaaaagttaataaactagaatcttggaccaccatgcatatataatgagaaaacaccctaccagatttatcccaaaccccacaacatttaaaaccaaaatgcttcctgggctcatctcaaaccatataatttctaaaacacaaaagatttgaaaacattaggtctcactctgtcatccaggctgcagtacagacagcaacaggagcatggctcactgcagccttgacttcctgggcttaggtgatcctcccacttcagccttccaagtagctgggactacaggtgtgcgccactgccactggctaattttcaaatttttttgtagaggtaaagtctcaatatgttgcccaggctggtcctgaactcctgggttcaaatagttctcccacctcaacctcccaaagtgctaggattacagtcatgaaccaccaaacctggcctgaaaacattaaatttcacaaatttgtaaatatccatttgtttcaataaagatttaaggaggcttaaatatacacaatataattatctctatcactcaccagaaagtaatttacctaaggccagggatttttgtctattttgatccatactgtatccctaatagatagaatactgtatatagtatgcactacataaatatttattgaagtagatttttttttaagtgagaaaattaggcaaagaaaaaaactagaaatagcaagataaaatcaggagtgagtttactactaaaaaaagtataagctgttaggtcctttatactttctaaagatgggccatacatttggccaagtttgctagcaactatccctaagacagaaacatgatctgttatacaaataaaaaacaatttcttgggaaaagcacaataatttttaattcttatattttgttacatacaacagtatcatctgttttgtcaagtgcagtctacctttaatatctgattgaaaatatagcacaatacagtatcagaaactatactgggtaaggtcctaggataccttcatattgatttcaactctgcctctaactttgggactttggttgggcgcagtggctcatgcctgtaatcccagcactttagggggccaaggtgggaggattgcttgagcccaggagtctgagaccagcctgggcaacacagcacaaccctgtctctacaaaaaatacaaaaattagccaggtgtggtggtgcatgccaataatcctagccactcaggaggctgaggtgggatgattgtttgagcccaggaggcagaggttgcagtgagctgagatcctgccactgcactccagcctgggcaacagagcgagacgctgtctcaaaaaaaaaaaaaaaaaattactttattgacttcatttctttccttctttataaaatttataattttaaattgtgatttataaaattttaaactcttttctctttagtctactttaaatgccaaatttatctccacatattcagaatacaaaccttttcaaatatgttaaattaccttttcttatttaagtaagattttcttgcctttccatattcaaggctatttgctattttctacactcttttcaggcatagacttttttcttagtgttgtatgacctagtaaaatctcagttatgtcacattgtttttatctgtaaaatgggcataatgccacttatcctaccaaaaggttgctgtgaggatccaatggggaaaagagtgggaaagtcccttgaaatatccagaattcttattattggtcaggtaatataaatgatagcttgattttacttcattattcctcacagctgttattagccttctccacaggttggtactactctttcaaaatgacttgaaatgactgttcacaaaatcttcagtagtatatagactatttgatctaatatcatcaaaacatagctttatttttactccaacttaatacaaacaaatgtttttattaaaggaaagttaagtaattttgcaatttataattaaaataatatttggggccctaatcattaataaatactttacctttctcccaatctgaattcctggggtatctgcttccacaatgaatccagtaaaggctttattagcaggagctttaggatctggatcagaacgtgccaataaaaaatacctaagagatacacataccggataatggtgataatatcggcaaataacacatggtgattgctctctcagttaattctcttaacaatcccaattattattacctacattttacaaatgaggaaataaataatcaggtttaaaaacttgcctagtcacgtacctagtatatggaagagctagtatttgaggtctatgtcttaataacacagtaggccctcccccattccatggggtttcactttctgtggtttcagttacccgcagtacagtatatatatgatattttgaaagacaaagaggacatttacataactttttttttttagacaagatctcactctgttgcgcaggctggagtacagtggcatgatcttggctcactgcagtctcgacttccccagctcaagccatccttccacctcttctgagtcactggtactatgggcatgtgccaccatgcctagctaattttttgtttattttttgtagggatgaagtctcactacctttcccaggctggtctcaaactcttggactcaagggatcttcccacgtgggccttctaaagtgctgggattacaggtgtgagccaccatgcctggcctacatttacataacttattacaatacattgttatagttctattttattagttgttgttaatctcttgctgggcccactttatagattaaactttataataagtatatatgtgtaggaaaaaaacatagtatatacagggtttggtatttctgaggtttcaggcatccattaggggtcctggaatgtatcctgcaaggataaggagggactatagtatgctatttaactttcttttagtaatatgagttgcaagtaaaaattcctggtatagtattattattacaacaagacagtctatgcctgttgaaactggcactttttctttcccaaaactaattttattctttaaggggcatgctatcttgaaaaggagggcaaatagagctgcctgtgaaaaggaataatataaaacggagacccggccgccgtgatgctgtcccggtcccactgtgtcccgggcgttcagccactcgctctctgccttccagaaggggaactgccctctagggagacrttccctgcctggggtctccttatgccagggaccaggttaccctaacagcaggaaggttgtcattaacaacagtgtcttcagtgttcgcttyttcagaactacarctgtatgcaagkatgacttggttacagtcaaaaccccagcgtttgcagaayctgtcacagagggagatgtcaggtgggagaaagctgttggagacacagttgcagaagatgaagtggtttgtgagattgaaactgacaagacattggtgcaggttccatcaccagcaaatggcrtgattgaagctcttttcgtacctgatgggggaaaagtcgaaggaggcactccgcttttcacactcaggaaaactggtgctgctcctgctaaggccaagccggctgaagctcctgctgctgcagccccaaaagcagaacctatagcagcggcagttcctccccrtgcagcacccatacccactcgatgccaccagtgccctcgccctcacarcctccttctagcaaacstgtgtctgcagtaaaacccactgctgtcccaccactagctgagccaggagctggcaaaggtctgcattcagaacatcrggagaaaatgaacaggatgcggcartgcattgctcagcgtctgaaggaggcccagaatacatgtgccaatgctgacaatttttaatgagattgatgtgagtaacatccagaaratgagggctcggcacaaagaggcttttttgaagaaacataacctcaaactaggcttcatgtcggcatctgtgaaggcctcagcctttgccttgcaggaacagcctgttgtaaacgcagtgattgatgatataaccaaagaggtggtatatagggattatattgacatcagtgttgcagtggccmccccacagggtctggtggttccagtcatcaggaatgtggaagctatgaattatgcagatattgaacagaccatcactgaactgggagagaaggcccgaaagaatgaatttgccattgaagatatggatggyggtaccttcaccattagcaatggaggtgtttttggctcactctttgaacacccattatcaacccccctgtctgccatcctggggatgcatggcatctttgacaagccagtggctataggaggcaaggtagaggtgcagcccatgatgtacgtggcactgacctatgatcaccggctgattgatggcagagaggctgtgactttcctccgcaaaatcaaggcagcggtagaggatcccagagtcctcctctttgatctttaggaggaacccacacaccctacaaattgatcatgcaggaactgaaaaccagtcttctccctgtcccctcatgggtcccaggttagcctggtgacaggcacatgctgttggcctcamgcaaggaagcagagcactatgtaaccagcagtcacagcttttttcttggtgttcctgcctggctctctccctctctgcacctgtctcataccctcgaatatcttaattccttaggcttgagagagagccttaatggatgctcattcatattcctgcctttcttccatcagctctctgcaaagatgattttgcttctccctagtgctggtatactatagagaaacccccgaggaccatgtgattaagttcctatcttttgaaagtttgttctgcagagacatctaggaggatgctgtgcctcccaagctcagagcagcctctgtcctggctgtgcacattctcgattccacttgtatggagggattgaacacaggcaaagaggtgctgctttccttcttcaatggcaccttcattctccattgtcattgacttcaagatgcctcttctacctctaccaggaagcacaggccaggggatctgggtgtgtgaatgggaggaragagcagaggttccctgaggtcacgtgttgtaatcatcatagaaggagagcccaggtctgccctcacgctctccatcataggctcacaccaagaagactcatcttggcacaatctcacacagctggggctgtagcaaccctttcctggttgctgggcctcattctagcaccttgttcttacttagagcagattctagcacatcatggcagtggaaccaagcgtagtcccgaagaagggccagagcctggtagagattagggaagggaggtctcctctagactcagattgccttgagcttttcaagtaagttgctgtaagcccgtgggctgaggaggcagttcttgttccttcctgcgttatagtggggccttgtctcttcctctgcaggacacagatttggaggacgtggactggggtaggaaaccaccctgagggtgttagtagatagtggtgtaatggatgaggtcatttctaagatgtgttgccggtggatctgggcacaatcattggaattccttggagctactgggattcatggctttgtatccaactgcatccaggccwgaggctgctgacatttgacactagggccagtagagagtgcctttttgtatcttgagccaagaagtgaggcctgggggtggggaggggggaaggggtgggagccaatactgagtgcctgcagcatctactactctgtcttcactattcagaacttgtaactaaagtatttaaagaaactgattttaaatgcaaattaaagggcagatgttctcaaaaaaataaataaataaaatggagacccatatgttccaactactgtttctttatgcagcaagtcagtgtttttgttatagctgagttattatgaatatttgctgattttttcctacagaagaatttctcagaaagatcttgaagtgcaacataagaaaaaaatgcaaatatccaagcatctgtctaattcatgttctatatatcctggtacacgaaaaattcttttaaaaaggtatattcttccctaaacaacacaaacttattttctttggttaaaaccaatacattaccactcattctatagttttatttaataatagtaacaaaatcgtaaaaattgttatctggtttcatatattacctaatttgccttactatatgaacagtgaacagttgtaatcagttctttctttttgttttaattttgtaaagatggggtctcgttatgttgcccaagctggtcttgaacccctgggctcaagcaatcctcctgcctcagcctccaaaactgctgggattgtagacgtgagtgattgcacctggctaatccgtttttaaaattacgaaaacttcaaactgcattgttagatttctctcaacttgttaaattttaatagtttcttcactttttattagttgctgatattaccaggaattggttaaaggtaaagatatagcactccataatactgaatatatttaggatgctcataaggaattgactgatatgtttaatctaagtaactttttagtaggctcactctgaaaaaaaatgatgttttatttgctagaaaactgtagtatatggcacacaaatatattgaatctgaattttttacaaagagagacaggtcatttagtacattattccaatcaataaaaagttattctagaaactctctatatacttgtagtgatgggtaaatacagtatttcccatgacaacttaacagcactgctgatagaaagcctgtccttatgttaagctaaattctacatttttctaactttcactcattaattctaagctggcatcctgaagtaaacatataagcctgatcatctttctgtgtaataatatttgaaaaacttcaagattcttccaaaataaccaaggctttgcttttcagaacatgttttgtaggctcctcctaatgcaagatacttacatgcttctagatttagtcaagtttttcaatacatgttttaaaatgtgttgcccagaactgtcaccattttttctctatttgatgctgtacttctattactttggcttaaaattacattggctttttaaaggctcatactattgattcttattgaacttaacagttattgaactttcctcatcttttatcaacaaataatcgagtgtttttttttagtattttatatttatacaaattatttttgatcctttgttgaacttcatattttttgaccatatattagaaaatttcagattttattaaagtcaaattctgtcttctctaatagataacctgttttaagactgactctgtttatttctgacatctggagacaggcactataccaaaggttctcctttttccttagggttttagggattccaaggagcggctggtataggagatgaggagtggagataataagccaagtagacagagtgctagccttcctaatcagattcaaacagagcacgcatttgtattttattttacacattaaacttctgagagttaatttgaaaaaacagtgcaggggcttaaaattagtttttgaaaatcactgaactgtttataatctcctttaggccttccagttccacaaacataccttaactgtagtggtttaaaaatatacagaaagaaagagagatttgaagataaaacaattaagaaaaaatatacaaagatgttttgaacaacataccaattagcttttcctccgttggttatccacatcttctgaccattaataatatactcatctcctttcttttctgctttggtctttataccagctacatcagagcctgctccaggttctgttacacaataagccttgaatatataaaaacaagagaaatgaaattaaatgttagtgattaaattttgactgtttggaaacaggattgttttattttttaagctgtattttaaatatttttaaatatctaaaattaaaatgttcttacaaaatcaaagaaaccactcaaatgtaaaaacttttctgttttgtttgtaagagacagggtctcactctcttgcccaggctggaatgcagaggctcaatgcagtcttggcttcctggactcaggaaatcctcccgcctcagcctcccgtgtataatagctgagactgcaagcacacatcaccatgcccagctaattttaaattttttgtagacatggcatctcactgtgttgcctaggctggtctcaacctcctgggctcaggcaatcctctgcctcagcctcccaaagtgctgggactacaggtatgagccacagtgcctggcctaaaaacacttaatatataattcaaattaggcataggtatatcaacaaatcatatatttaataaaaagtgaaaatgttagatagctttaaacaagttcattaaattcaatttcacatgtattcattcatgcaaacatgtattgaatatctactatgtaccacgatgtaaattaggatatggggaaaccagaggtaaaagacattcagtcctagagattttcacaatgtaacagtgaagataaataactatactgcaactctatgtgtgaaagtcagacaaggggcttgagaaactagtttcccagggcagaggatgtttaaattaagtctcaaaaaggaaaatggcttctttgcgaggagggaaaaagaggaagaatatgcattccaggtacaagtaatggcatatgctatgacactaagataagaaacagagttacccagtgtttctaatgctgaaagtaccagagttccacagtatgtaaattctgtgcatgtaagggaatggtaagacatgagtctggaaagaaaggaaggaaatggtcgacgagaatcttttatatcacattacaaatttaaaattttatctggtagaaacaggggagcctcttagagctcttaaacagaggagtgacaagacacaagcagtaatggataaaagggggtggtagaaggcaagtgttagtgcaagttaattcaagagtggccggtactgtggatactaaagaaacaagttacttgcccttaaggtacttacagtccaaagaagaaagaaactgggccgagcatggtggccccccacctgtaatcctagcattttgtgaggctgagatgggaggatcgcttgagaccaggagttcaagaccagcctggtcaacatgccgagaacccatgtcaatttattttttaaaaatatacaacaaaaaagaaagaaactatatacattttaattcaaagtagtaagcatatataggggcactagaaatgattacttagggccgggcgtggtggctgaggcttcaggtttgtaatcccagcactttgggaggccgaggcaggtgggtcacctgaggttaggagttcgagaccagcctggccaacatggtgaaaccctgtctctactaaaaatacaaaaacttagccaggcttggtggcgggcgcctgtaatcccagctacttgggaggctgaggaagaattgcttgaacctgggaggtggaggttgcagtgagccgagatggtgccactgcactccagcctaggcaacagagcgagactccatttcagaaaaaaaaaataataacaatacttggctgggcatggtggctcacacctgtaattccagcaccttgggaggccaaggtgggcagatcatgaggtcaggagatagagaccatcctggctaacacagtgaaatcttgtctctactaaacatacaaaaaattaggcaggcgtggtggcacgcacctgtagtcccagctgcttgggaggctgaggcaggagaatcgcttgaacctgggaggcagaggttgcagtgggccaagatcacaccactgcactccgacctgggcaacagagcgagactccgtctcaaaaaataaataaataaataaatataactatactcaaacatctgaagggcaatatagccaaagaaaagtacagtgaaatcactctaacatttattgaacacctattacagtatgaactggtaaaattataaaaaaaaaaatgacaggttctgtgcttaagcattatgtaatccaaaatatttttctaatgataacagatgctcgcaaatgatgctgtttcagaaggtgttgattcccaggcacctgaggtataaaaacatgtcagccagatggtcttttgacagggattctgtagaggggattcaggtgtcactcaagttaactgaactagattactctgctacctggagatttgatgtattcagcatcatgacaaattaaggagttgtccataaaagatgccccttttaagtaccaaaattttgttttaaccacctttaaggtatttttttccctgaaatatgctattagacatctgtctgtttcataatacagtgaagtttttagagcctgtgaagtaaatgagcctgtttttttctatacaaaatggcttgtcactactggttcctcagagttgtttttgtcttcttttcttctttttggtttctcatatatatatatatatatatatatatatatatatatatatatatatatatatatataatttgtgtgtgtgtgtggtggcagtctctcaacgttgtccaggctggtcttgaactcctggcctcaagcgatcctcctgccttggcttcccaaagtgttaagattacaggcatgagccaccatgcctggcctgttcttggcttcttatttgatcatttttatttattttttttctgtattattttttaccataacattattttccaaagtaaaaacccaaggagtttaaacattcaacagtacagaaaagtgaaacaatttatagcatatccattagatagcaaattatgcagtattgttacagcatgtaaaaagaaggaaggcataagaaaatgttcatgttgttaaataaagatgtacataaaactacatgtatataatgggggctaactgttaaaaacacaattacatatttaaaaatgtggtaggcactacaataaggaagtaatactaattaactccatatctgagggattacagatatttttgttctacttaaaacatttctaaattttctatactcagtattttataattagaaaagttataaaattttaattttttaaaagtttgcctttggcatccacgaattttggaatttaaccaactgtggagcaaaacccacagatacaaagggctaactgtacattttgtataacagacttggcaaccaaaaattttgatatggagggcaacaggtcctaaactattccctcatggatatggagagctgactgtatatgctacaggagaacaatctagacgtttcacacagttcttatagacaatagtgagaatgtttagctaacctctcaattgttaaaaaaaattgcaaatttcctagcaaatatgtacaaattcctttattaaacagtttgcttgaaattttaggtatctgaaataaaaaacatttattttcaaatattattttctgttctttaagatgaattctcatcattagctcaaaactaatacatctactgtatttcagtataacaaccacaccttagattgaaatatgtttgagtaaacaagaagtaaaaatccttaggtaaacaacagtttcagaatagagcgtgtgtgtgtgtgtgtgtgtgtgtgtgtgtgtgtgtgtatgtctgtgtgtgtatttatcttgttaaaaaaatctaatttaaaaatttgttgagttgctttcagaggtttaaataaactctacaactattcttcccaagtcattcagtcattcaacaaataagttgctattt

SEQ ID NO: 94974 - DNA, 41001 bp, Homo sapiens
tcctaactcgtatcttttcacttactgcactcctttctctatgctgaagcagaactgagtttttcagaacaaaaacctagaaagccactctttgcttaaaactgtcccttcaataacttttccctgaactcagaaagaaattcaaactctttaatctggtctacaaagccttaaatgacctggccccagcctccttctggcaccttctttccactctctagacccactgaaactttgtatatacttttccatcttcatggaatgttcatttcccagctacatgcctagctctttctgttcctttaagtcttagcttaaagaaagcttttcagagaagcctatcttcaagtgagctgctttttgcactgttctctattaccaggttgttttttccttcggtagaacattttgcaacttgcagtttgttttttgtttttttgccagttcacttgtttgtttttgctgtctcctaactttggaagaggaaccaagacagtctttaatcttgttcatcactgtgcccctagtacttgacacactgagactcaatacattattgttgcttaaaatgcaattcagttttatatataaatatataaaaggtataaaaaggagaatcaagactaaacagatgtttacctcatgcatgctcatttaaatgggaaaaatgaaatattctttaaaactcttaattttacatgtagttccacagtattttttcttaaagcttggcaaacaaaaacaaactatagaatgctgaagtaaaatttataaataaaaacgttaagaaagaaaacaggaagcataacctgggacttatattttcctagcaatgattagctactctttttttctaatattaaaaattaatagattgagcagaccaataaataatatatacataactagttgaataaggtaatatctcattgatatttatagcaggttaaaagcttaaaattacatctacccacatatctataaattcaagtacaattacaacaaaattttaccagaatctgtgcatcctgcaattgtcgacactgcacatgaagaacaaatggttcaaatttcaaagtggcatcaccatttgctttcttcagagctacaatctaaataaatgaacagtggtatcagatgcaagtatatggcctgtcctttggcgaccctttaccccatacataacttcaatttctcttagaaattttcagaatcactcagcatattttttctgcagtaacttttccctctgctttcttggtcctttttcaccaaaaatttatttgcttattttcttaaaatttctagttctcccgtaaatcttctataccattctttccacctattagtgtgctttgaagaagtaaactactactttatttaattccataacggatttttcattaggaaatgtagtatacaaaaactgtattaggattgtttaaattttttgttagattgagatagagacaaatgtaatgtgagagaagggtccaaacaaagcctaactgccacccatgttcccaagaagcatcctgtaccaagcaccagtgcttaccagcagcactagtaagctcacaaatagcagtgcatgcaaagagctcagagcacagccagtgagttcctgttccctctgtaacaggcacagttgttgtaacaattgcaacttgcagtttttttgtttgtttttttttccctgttcacttgtttgtttttgctatctcctaactttgggagaggaaccttggaactgctcagctacatgagaaccaatggcccctgagcacgttcctagctttctgtatttcagaccctatggggcagtgttcagggtctgggagctactgcagcacaaagtggggtacatgccatcactctgccctgatcagctgtggaaccaatctgctagccatggggactgacacattgcaaagggctagatcttgtgtagtctcttccctcctgctataagcaaatgttacaacacttgagcctagtatgcgtgttttttgttagtgaccttgagtcaggtactagtctcttccctaggtagcacttgcctgccttttaaccttggctgcacccatgttacagtgtatcctgcggcgtagtctgaccacctagtgaaacatgtaatattgtgtctgagctagaatttatacaagacagttattatttctgtctgcccagcatccccgggcaacatcgtcctgccttcacaccatttgatttctggtggggctgtcaatcattaccctgtcacacatcactctccctatcacaatatcagaggtgccaagtgcttgcttatgtctgatcaaggatatcatcacattccactagcaaaaataattaacctaagagggagagcacctaatctaagcaggacaattccaagtccttctctaagatggacacatgaattgcaggaaaaggagttctttttctactggtgttgctgacagctaccatttctgcaacaaagattatctgcagcagaagagaataaaggcacactgcaaagagaaccagtgcctaaagatgaagatgaagtgggtactctgaagacaagatttgaacatctgaaccagcaatacttgattctagctccattcgccctttccagttaaataaattatcttttttgctaaaaacagaattggatttgtaaattcactgggaatgaaaagtgcctggctgataaaaacttatgaattcatctaaactctttaccttaggaaactaaataacccagcagagatatgaagattttcaaaaagcaatgcaggtaagtaatgtattatttatttatatcagtaaagctggtaacacagagatagtgctaatccccttctctttccataatttgttctaggttacagggttttcaaatagcagaattaaaattcaaaatttggatccaataggtgtccaatatccatgaactttctgctgtgtccaagaggatgtgttttgttgagtagcagtaagtaatgcttccatactttttatctcctacaacccaaaaagagccattgtaatgaaagctctctaggttttataatcttcagccattataactctgcatataaattaccttgaattttctattcttgtcatatgtatttaaagtaactgaatttaaaagtttatttccaaatttattttttaaaacttaccacatcatcttttacacaaagtttgtgtgtaaccagtagccagcaacagttttgtttctgaacctcaaaaccatttataccctaaaataaaaaataacataatttaagtttcatataatattttacaaaaataataagcataatgcatagtatattgtaggctttcttaaattaataatcccaagtcaggattttaagtattaataaaaacaattcggtatgtttttgggtaatgttaacccagaataagaatgagcccaaataacttgaggtagaaaattatgtgaaaggtaaaactacttgataaacatcttctgaaatatggtcatgattttgcaagaaaaaaagggattagtataagggataatactagcagcacctgagttgtactctagctatttggctagcacagtatttaaaaatgaaaaaaaaataattttaatttcttttgtaggacagcactgtcccaattccacacaagacctactaccctttattgtcacctatgccgtttacacatttataatacttccttggtctctagaggcataaatttgtgacctctgaattagactttagatgtagtcctgaaggatggagctaagactgaaaggtcaaagtttcatgaaggcaaacattttaatattaacttaaattgaacaaatgtttatttgcaaagttctattaggtactttgggtatacacagaacctacccctcaaggacactggaaaggggatgcaggaaaccacatgaacagaaatcactatactcaaagtaactataatttatacgatggatccacaagagactctgctgtctgcccttggaaccgggaattgctatgcatgtcctaaataaatattttgacttcattgtatgacttcggtgatggtgacttacgtatctgacattgtgctggctactctgaatcttagagccaaatgtatggcccacttctagcaactttacaggatctagtggtgggattggcaactaatgccatcgctggcttcatcttatctatattttctttatccagattttcccactttttattttttcttgtgttgcctgtttgtaagttgccccaaatccttactgaaataaggcagattttaaaataaaccataatacgaggtgtaagataagaaataaaagtctaaccagtacagaagcagtcattacttccaagtaggtagtatgtgtttgtgggttcaggtgggagaggggagttttgggaatcatgtctcagatatgcagagataggaaaacatttcaggaaaaaaaccgccaaaaaacatgagcaaaagcaagtaaatacaagatgaaaagaacagtttagtttcagtaactagctaaagatgaagaaaagcaatgaaaaaaaggttgaaaggtatactagagtaagcatttggattttctgatgtagaaaaatgtgtaataaaacatagcataggtgagagataagcagagttgcaatttgtcaaacatggtttggagaagaatagttaagtggcttgttagagaaccattgcaaaaatcaaggcgagacagagttatggaaatggggcaagagagagtttgtgggcaagaatgccattgctctgaaggtgatggaagtgatttaaaaatgaacaggccctgctaacttgagagatcagcaaataaatgatcagtcaataatggacctaaagaatgagcctaacaatgtgctgtcttccatgctcttaagccaatactacgaataaaatcagtacacagccaacttttacagtgcatgggccaggcacaaagccaaatatttcaaaaaaaattatcttattttctccacacaaaatccctataaagcagatactttttattatcctcagttcatagaacaggaaggggcagagttgagatagctttcctaaggtcacatagcccgtggtttttaatctaagcagtatcactcccaagcagccttatcctcaggggatatgtcccaagaccccctagtggatgcctgaaacctcagatcaatttctttttccttcttcacttcacaatttcactgacaagattcattctttccgtagatcttagcaacctcagcatatgctgttttttctttccttaagtctttccttaagaactttcaccttttcacttcaaaaaagcactttaaaacttactgttggcagatccaaatcgccagcatcattactcccgtactttggggccattattaagtaaaataagagttacttgaacacaagcactgtgataccaccacagtcgatctgataacccagaaggctaccaagcagctaaagggcagcaagaatatatagtggaatattctggacaaagggatgattcaccttccattctggaaggagctggttggctcaagattttatcacgctactcagaacagcatgcaatttaaaacttactaattgtttatttctggaattttcatttaatattttcagactgctgttgactggggtaactgaacctgcaaataaggaggtatggcttgtacagctgcttcttgatttatgatggggttacatcccaataaatccgtcataagtggaaaatgtaagtcaaaatgcatttactacccctgtaaacccatcataaagttaaaaaaaaaagtctaaccatcctaaattatatacgatcgtacttttctctgcgtaaaactactagagttgtaataatggaggggctcactaggaggcagtaaactccttaacactggtgatgttcaagcatgcagtaacaatgatttgccagagctgttgatgagcggattccggcattcaataccttagcaagctacaaagtctttagattcccttagtattcatataataaaatcaaattttctaaactttgccacacaagatagttcccaggtcagcagtttcaacatcatttgggcacttgttagaaatgcacagtatcaggccctaccctacacttaaagaatcgggatctgtattttaaaagatsctcagctgattaatagccaygttaaacttttagaagcactgatctaatcccctaaatttcacatataaagaaacagagaccaccyctcagaggagcaaacacagacatgctggatccggtcgtcactggatgggaacagggctcctraagtttcgcactagaaggcaggcgatggacaggcgcaaaggggcctcacccggtcaaggagtaggatgcggccagcgcaggagctggtggtgaaaaactgatctcgcatgttcagaaactgcacaagctctaccacatcctcgtcaacactgcccttccggctgaggtccgctttgctcaaacattgcgccttccatttcctgaactccgcgctgcgatccatgggtgacggactcagggtctgcgctcggctccttcatggtagcctcgtctctccctgggggcagccatattgaagcgagcggtggccgaaaaggtccaaacttcctcttcgttcttaatttgggaaattctagtgccttcgcctaggggtggagmgaggcgcacakcctgggtggagcgaggcgcacakcctgggtggagcctgcaaaagttggagaaggtgtggcagtcctcatttctgtggaatctgaagaagcccacgcagattttaattcccactctagattctggtaagtggttttaaaaactctccttagttgtttagacagcgaatctccccactgctcgtccaagtggaaccgagtttgattttggctgcacccctttcctgccctctgtcctcccagagaactagtgcgtagagctccagaccgaagccattcccctccaggggctgcaagttcccatccataaatcaggtaggaagttttgccttctggtcctgggctcctagccctggtcctgcgtttaggctctgagtttaggctaccacaccatgaggtgtccgttggcactacccctgcycagcctccgccccccgcactccctgtcccccagccccacgctgcaccccccccccccgccagtcacccgcttgatttttccctgcagccagtgcctgggtttggggattcctgcagcagcgcccagcggtctgtccagggccccttcccacagcccagctctcagctgtagaggatttgtcctaggtagggccccttcccacagcccagctgtaggggatttcttctcctaggtagggccccttcgcacagcccagctgtagggatttgatttcttctcctaggtagggccccttcccacagcccacctgtcagctgtaggggatttctcctaggtagggctccttcccacagcccagctgtgggggatttcttctcctaggtagtgccccttcgcacagcccagctgtaggggatttgatttcttctcctaggtagggccccttcccacagcccacctgtcagctgtaggggatttctcctaggtagggctccttcccacagcccagctgtaggggatttcttctcctaggtagtgccccttcgcacagcccagctgtaggggatttgatttcttctcctaggtagggccccttcccacagcccagctgtgggggattttttgtcttggattcccacaattacaggtttcccggagcttcctccagctttgccatcaggattgcagtctttgagagaaatgtatagttttattgaccctgtgacgcccaccacctagaataatcttcaaaagaaaattacaaaacaccctgttaacacatcgttggatgtttatactgagtttcyagaggagactcagtgaccagggaaggtgtgtcaatgattaaacctaaaggctaaagtttggaatgcttgtccgtagctaatggaaattgttgtgcgagtccctctgaagccactgtgattacgtgtctggttagcgcagcgagttcagcagcaaatctctccaagctctactcctccagcattagggaacagactgccctgttccatacgatcatggaacctggaggagtccgaaattattaaactcctcccctcttcttaccccgtcctatctcaagtgaacagaagtgacctgataagatcacacagccaggaagagactttctctgaccacttgtaattcttgccttttttacatttctgggttaataataaaccatatgcttacatgagtcattgtgtattagcagcagaacaatttgtaatgattgattttttttctaagttttcagtttttaaaattcttgccagaattcttatttaattttacttttgctcttgtctcataatgttcctttgctctggctttgtgacttgatctgttcatcctatgttaaaatatactcctaacattttcccaattcctttaattttcgtttaaatcaaatggatacaagcatagccaggaaaaagatcactgttggaagagggattttagattttctatttcctagatttgtaaggcatattggcaacctttcagaggtaaaattaaaccaaaaattaaaccaagggactcttaatttttaaaagtttatatttgataaacaggaaggcctatttgaagtatagtttaattaaaaagcacaagcaatggaaaggcctgtcctgttcacaaggatccgatgctagggagtaatttttttttatacatttttaaaaatagaatcatgtcctttgtatttctgctgcattccctgacttagtgggcatttgagaaatttcaaactctaagcagatgccttagtcataaaatatgcgattctacctgcaggttagtttgatttcacattttctagctcaatctgtctcactatcactattrtaaagtttatttctacgaagtaaagggtcttatatgccagcatctcaaagggtgagatgaaaaggatggtaaagaaaaaaatcagctaacaccatttaattacaggacttgggttctagctttgcttcygtgtgaccctgaccaagtctcttaacctcttgtgatgttttctcatccataaaatggatggcgattttatttttacttctgcataaaataatagtttaaataacttctctacctgttctgaaaacagttaagtcaatggaggtggaagacttatgctttttagaagaaatccrgtattacaggattttaagtattatcctatttgccatcagtatgccacgttattttattctttgtgtaatctcctttgacaggcttcatcgttatgaagcatatgatgatcccgtggataggtgagttcaaaggcaatgagtgcaggttggagcctgatgaatcagaatgctaaaggctcagtgggagataagatcaacagaagcaaagtaggagatagtgtggtcaggccatgccccatcactttcaagcctgataggataatgtagtcagatagtactgggcaaagcagatgagtcttccaaatccagtaggatgagtcatcttcctttattcctttctcccaacttagccaatgccaaaatgtggggggggaaagatacagatcctatttcagagtaattttacttttattattacaacagtttttttatggtaatcatgagatgtgagtgaaagaaatatgtaggaagtaggtagatatcgaaaatggaaaaagcaagcatctcataggctatgtgtgtaggtgtgagagagagagagagagcacccagcttacagaagctaggggcagggtggggcattttcttcttgctctttgtgttctctgagtttaacacaccacttcatgtacagttaaggttcagaaaaatacgcattgcataacaaccaatatttagtattaatgttttgtttaagtcatcttctagaccgaattctttgagaataagagcttgttttgataaccagagttctgtaaatatcgttatattaaagatgattatagaactatagagtatatttttttcataacattttaatgacttctctagtctgctgcttttttttttttttttgagacagggtctcactctgtcacccaggctggagtggtgcagtggcaggatcatggctcactgcatcctgatctcctgggctcaagcratcctcccacctcagccttctgagtagctgggaccactggtgcttgccaccacacctagataatttttttttttttttttgtagagatggcatttcgccatgttgccmaggctggccttgatctcctaggctcaggcaatccttatgattcagaaattgaaaagaagaatagaggggaaaacaataatgatgtctactatatacaagatcatgtgtttgctaagttctgtgcttggtgcttgccacgtctctagcacgtaactctgagtgggatcccagatttcagatgaggaaacagcatcaagaggttgactgccttgcccaaggccatgtggctcccacatgatagagctgggactcacacctcgagctgcatattccaaaacctgctctttccgtaacgtcatgttgaaaaaaaaaaaaacaaaacaaaaacaacctctatgttcttatatccaccatggaaaattctcatctgggctacctttttcttttttattttcttgatactttcactttcttgtctaaggaattctgagctagagtgaagacctgaatggaagtagagtggtgagattgctgagtaggactggactgtttttttcccagccctgccctctgacagatcatctccccgtcagagactgccaagctgttctaaagtgcagtgtttatgccgtaggcctgcttctgcctctgtttttccccgaggaccacccttgaggatatgtcattgctaaacaacctttggaaatgtcactttctcctttgtgctagacattgttaaatccttttaagggttttaaaatggcacaaacttttgattaattatatcaagaacttcccatcaataacactaccaaaatacttatgattccaccccttgccccagctgctgtatgtggaaatgtggaatgacattttatagcctgtatgggctctgttctgagtagtcctgtgtggagttttgatacagtaaaagtctgaattctttcatatcaggtcctggtttctgcagctcttcttaatgtttaarcttcttgtggttgaggcagatgttttaggtgatggcagaatctaacactatttggttgatttcaagaaattataacccacagataaaattatggggatatagtcaaaacctttcattacatctttacaggtacaaaaatttttctaagattatataactttctgtacaaatrttctttgcttttttctaggttatttgaactctgagttttcatttcmtttggtattaacagtgataggacagaaaggttagctgtgaccttgtaatttataaaagattgcatatggtgcactgtttttagttttttgatgtttttccccttttgttaaaatgaatgaactacataaagccaagtgttttgacattgataaatctcaaaaacttaatgctgaaaggaaatagcgaattgtagaattctttttcaaatcagaattttctttttcctttcagcactaagtttctgagatttttatattccctaaactgtgtaaataaagtttgaaaacatgcaaaacaataacacatattgtttaatattacatactcatgtagaagtggtattaaatgcttgagaatgatgagtactaaatttatggttatagtcacctcttgaaagggtgggacagaagcaggtttggcttcaattatatctataatggtttaggttttttaaatgttaagatttgttaaagctgggtaatatcatttggctctgtcgccacccaaatctcatcttcaattgtagctcccataattcccacgtgtcatgggagggacctgggggaggaattcaatcatgggtcaggtcttttgcatgctattcccatgatagtaagtctcatgagatctgttgggttttttttttttttttttttttttgagacagagtctcgctgtgttgcccaggctgcagtgcagtggctggagtgtagtggcrtctctcagctcactggaagctccacctgccgggttgacgccattctcctgcctcagcctcctgagtagctgggactacaggcgcctgccaccatgcccggctaatttttttttttttttttttttttgtattttttagtagagatggggtttcactgttagccaggatggtctcggagatctgatggctttataaagtggagttcctctgcacatgctctcttgtctgccaccatgcaagttgtgcctttgttctcctttgccataattgtgaggtctccccagccacgtgaaactgtgatcccttaaacctctttcctttataaattgtacccagtctcaggtgtttcttcatagccatatgaaaatgaactaatacggtaaataggtaccattagagtggggtactgctgtaaagatacctgmaaatgtggaagcgactttgaaactgggtaacaattggaacagtttggagggctcagaagacaggaagatttgggaaagtttggaacttcctagagacttgttgaatggctttgaccaaaatgctgatagtgatatggacaataaagtccaggctgaggtggtctcagatggaaatgaggaacctgttgggaactgagcaaaggtgacttttgttgtgttttagcaaagagactggtggcattttgcccctgccctagacatctgtggagcattgaacctaagatgatttagggtatctggctgaagaaatttctaagcagtaaagcattcaagaggtgacttgcgcattattaaaatcatttagttttatgtattcacaaagatatggtttggaattggaacttatgtttaaaaggaaagcagagcataaaatttcagaaaatttgcagcctgaagatgcaatagaaaagaaaaacccattttctgaggagaaattcaagccagccgcagaaacttgcytaagtaaggaggagccaaatgttaatcatcaagataatggaatggggaaaatgtctccagggcatgtcagagrcctttgcggcagtcgctctcatcacaggccagaggcctaggagttaaaaaatggtttcctgggccrggcccagggcctccatgccgtgtgcagcctagggacttggtgctctgcatcccagccatagcttaaaggtgccaacatacagatcaggccatttcttcagaggtgcaagccccaagcctctgaggcattcatgttgtgttgggcctgccagtgcacaagagtcaagaattgaggtttgggaacttccacctagatttcagaggttgtgtggaaattcctgaatgtccaggcagaggtatgctgcagggatggagccctcatggagaacctacctctgctagggcagtgcagaagggaaatgtgggctgggagcccccacgcagagtccctactgggacactgcctggtggagctgtgagaagaaggccactgtcctccagaccccagaatggtagatccactgatagcttacactgtgtgcctggaaaggctgcagacactcaatgccagcccatgaaaacagccagcagggaggcttaccctgcaaagccacaggggcagagctgcccaaggccatgggaacccacctcttttatcaaagtgacctggatgtgagacatggagtcaaaagagttcattttggagctttaagatttgactgtctcgctggattttggacttgcatgggacctgtagcccctttgttttggccaatttctcccatttggaatggctgtatttacccatttcctgtaccttctttgtatctaggaagtaactaacttgcttttgattttacaggctgataggcagaagagagttgccttgtctccaattagactttggactgtgaacctttgagtttatgctgaaatgagttaagattttgggagactgttgggaaggcatgattggttttgaaatgtgaggacatgagatttgtgagggtcctggggtagaatgatatgatttggctatgtccccacccaaatctcatcttgaattgtagctcccataattcccatgtgtcatgggagggacctggtgggaggtaattgagtcatgggggaagggagttcccatgctgttctagtgacagtgaataagtctcacaatatctgatggttttataaaagggaattcccctgcacaagctctcttgtttgccaccatgtaagacatgccattgcttctcctttgccttccaccatgattgtgagacctccctagccatgtggaactgcaagtccattaaacctgtttcctttataaattatccagtcaccagtatttcttcatagcagtatgaaaatgaaccaatacactgggtgtcaggtaaatgtttggaatgtttcataatctaacaaaaggaggtcagtttacctaatgttaataaaactcaactcataaaatttctaaggtattgcaactcaagcaagaaaacctaaatatggtatcatgctatgtctatccagatgtttttgtttgcatgtttgattcctttgttgaaggcactgaatccctgcaggaagtagcatgaaggattctgctttatagctgagggatttgtaagatgaaaggtccttaaacatgaaatgagatcagtggtaagctcatgatttaaattgttatttgaaaaaattgtttgatctgctccctccaggggggaaaaacatggtgatatcctagatacaatgtgacaatacattaattttttttcttccttagtatctagatcaccatggcgactggacagaagttgatgagagctgttagagtttttgaatttggtggrccagaagtcctgaaattgcgatcagatattgcagtaccgattccaaaagaccatcaggtagaaataaaattaytttattgaggctataattatactgagtgtgagtctcttgcacattgtattaaaaagaagcagactcacaattatttttaaaaacattgaattaggatgcagtttacactatgtatacatatggacattgataaagttaacataaacctgataattagtgaagtagatgtatgaaaaagaataacctctggttataagaaaatttttgatgtagggaatgatctatgtagtgcaataattggatttttctgaatggacacataaggagttttgaataagttattctattacaaacattcatgatttttattttttgcatgctgggaaaacaattttcttttgcattcatgctttttcatgtgtgattcatgagaatttaagtatatagtttaatcatctccagtgactttaacaatacacttttgattttaaattatgtatttttattactgcaccctccatggctcccaagtctaattttcttagcaagcctatgagagtctttacagtttggatataacctatctttacaratttatttctcatcacttcctctccatgtagagatacagtgctgtaacaacatcagcttttgtccaatttccttaakacttcctttcatttctctgtctttgcacatgctatttttttttacccaacctatcctttctctcattcctaaagaatttctacttatcttttaaaccctaactaaataccacttcctttataaagccttcccttacttttataccagaggtaatcattctgtgttaattaaggtaaaattagctcccacaattgctgtaacctaaaaattgcaatagtccagccatggacaattatttcttatacactaaatttaaaagttctcaaatgtgggtgggtagctgttctccaacagtgacttagggactcagcttcttctttcatgtggctctgccacccaacccgtcttcagggtctccatggaagaagaaaagcacgatgtggcttggctgggaagttttaatgggtcaggtctgcaagtgtctactgtcacttttgctaacattccattggctagaactcagttacttggctactcataaccatgagggaggcgaagaagtaccactctttctgtgtacccaggaaaaggagaaaacgggtttgatgaacacgcagaggtctctgccacatatccccttagatatttctttcactattttccccaaaatgtttttaatgcagtacataagccattctgtcatacttatttatgttagcttgtaaaacttggaatgtgagcttgttgaaggcaagcacttatttgttttgcttttgtctcccattttgatagctcccataatcagcacagtcctagcataaagttaaatgaatgcctaaattctttctgtgaactaaaatacattgtcattgcaggttctaatcaaggtccatgcatgtggtgtcaaccccgtggagacatacattcgctctggtacttatagtagaaaaccactcttaccctatactcctggctcagatgtggctggggtgatagaagctgttggagataatgcatctgctttcaaggtattgcatttttaattatttctattttggctgaatttatttcataaaaatatttgaacatagctttcaactgcatcttatttaaggttttaaaaggccccattacacaatttctgccactcgggggactcctctagtcaaaaaaggaattaagaaattagattttatccagaggccttatttgtttactacattgtagtgaataggtgctgggtaatttctgtatcttcatgtccccacagaatgaactgtgattttttttatttaatagaaatatgtaaggaaagaaaacacacaaggaagttagactatttcctaactcttgatgatacataagctaacataatttttaatttctcttataaattttgcttcataatataaagagaaagttaattcttttgaaaaataagtaaaacatgaaaaaatgcaaggtcactatrcagttttggagccctgactcagtgaaaatgttatgctyaggwtatatatatatacacacacacaywtatatatatatatatgcccaaagacatattcatagtaagctcatgtcctagcatctttcctcataattccttgacctgctcaactttggcagcaccttaccaaaattaggttgagacagagaagattactgtgcccctgtacaggaagactggcaaattcatacagctttccacccctcagcttgtggcaacctggcttctgcccccatcgctccactgaaaggattcttgctaatgtcactaatggcctctgtattgctgaagttaatgggcccttttatgtcattatctttcttgatttctctgtgacatttgacactcttagccacttaactttttctttaaactttttctgcagcttctgtgacatcattttcttctgttctcctctccccctcctttctgggcctccgttttcaggcctctctttttctctggatattccttaaatcttggtgttgtctggggctctcagtctctatttagacctctgctttctgtattctttacctttttcataatctcatacactctttttgttgccattatcacatgttacatctttagcatagaattttctgctaagctctggatctgtgctatccaaaacagtagccactagctacatgtggcaatttaaaattcaacttaaattcatattgaaaattcagttcctgagtcactctagcaacatttcaaatgcttaatagcctcccgtgtccagtggctatcctgctggacagtgcagatgtgaccatttccatcattacagagagttctgttggagacactagactcacatgatcaacctccagaaatctcttacaaaacatgtctaaaactagcttatcttttctcactgcagatagcgcctctcttgtgtgactgtcttggtgacttctgggatttgaggattactcctcgctttcccttactagaactgttttctctctcctttccatttccactgccagtagtttagttcaggctatcttacctacttaactatacccctgacctgaatttctataatagacactttctcttttccctggaattcatccttactctagaatgaatcactttatagaatttaattctgattgttttacacctctgttttcattcttgcatccatgtcttgtagacttcagggagactcttaaaattccttattgctatgaaataagactgtttcatgctctctcccatctgtctttccagtcttaactcccactcctcctcacagtgtagtttattcttcagtaatgaagtgtttgtccttccctgcacatcccatgctctctcatctctgtgtttttgttcatattggttcttctaattgacagaattaaattgaaacttacaaacatggattcaaaggattttacactttagcttcaatttcttttcattttatctcctgaaacagttacataccacacattagtctgcttactcattggtaataaatgctgctaatttcrtggcatttattcctgtccctatcgtttggccaactttgtttccttcacccgtaatgactcttccccattctagttttcaaaatcttgtcctgttcttcaagatttacctcaattgttagcttctcgataaagctagtcctaatttcctctacttagaagtaatttctttctttttcttgtacctatcttcagtggctcatcatgtttgccttgctttttgtaattatttctatcctttgcttttctctcctccgagagtctaggatgcttgaggttagggacagtggtattgatgtscctcacataacttgaaataatgctttctatgtagtatattcgcagtaaatgtttgaattatattgaaatcaattcaacatgttttttagctgttaaaactggattaatcttcatcatatttgacatttctgggcaaccatattaagcggtgatacttgtctttgactcttggatggcttttgaatcttttttgtctttatcctatcagataacatttctacattttcagatttcagttaaagtatactgagcaatcattaccttaataatttgcctattctaaggaatatctacttttttctaaaaaggaggagttaaggtaggtggttacggtgggcagtctaattttccctaatgtgcaaattacatactggcccaataatgcctggcctagggcattgtttcaccctgagtcctgcatctactttttaatagtgaggtccagcagacatytgttgaggctttactgtgtttctggtgccgtgacaagaagaaggctgtcctgggtcatcctgctgtcagggtcctagtatggttttctgcctttgggtgtttgcatgagaaataacggcaatgcaggggtgaggaaactcatggatgggatttagagtaggtgtttggtgtgcggaagaaacttcatatcttatttgtttcttctccctagcattttggacaaaaataacagtttatattgactgctatttactagctgcttgatctgaggaaattattgaacttctttgttcctcagtttactcatctgtgtagtggggattgctctaaagtagagataatacatgcccacctcactagctgttgtgaagatgaaattagataacactccagagacacttaatgcagtgcctggtatagcaagctcttcatggactgagccatcaacatcattatgatgccattcaaggaagtttatccttctttttcttatatkttttctgttttccttagattttcttcccattggttcccattaataaatatttttaaatgtgaagtattttaaaatgatttatggctgggcatggtggctcacacctgtaatcccagcactttgggaggccgaggtgggcacattatgaggtcaggagttcaagaccagcctgaccaacatggtgaaaccccgtctctactaaaaatacaaaaatcagccgggtgtggtggtgcgcgcctgtaatcctagctactcaggaggctgaggcaggagaattgcttgaacccaggaggcggaggttgcaatgagctgagatcatgccattgcactccagcctgggtgacagtgcaagactctgtctcaaaaaaaaaaaaattatttatatgagaccctatagaggacaatatatgagtactcacttatttcttgttataaaggattatacctattttgacataatatgtttagtcttcctgcatttattcatttatctcttcccctagaaaggtgacagagttttcactagcagcacgatctctgggggttatgcagagtatgctcttgcagcagaccacactgtttacaaactacctgaaaaactggactttaaacaaggagctgccatcggcattccatattttactgcttatcgagctctgatccacaggtaataacacattctgtcaattttatggccaatgccaaaagagggtagtgttaactgcctgccttctagctgtctgtccatccatctgttcatcatatttggttaccagttacttaccattaaacatttatataatggaaactgtgaatttggggaattgtgctaatcactagggatacaaagaagagcaaacactgtcttcaagatgctcacagtctagtaagggaaatgacataagagtgatcatatttatatataatgtggaaagtacagtggtagagatgtgcatagggatatatagactcagaaggcatgtgcctgtggtgatgaggtagggcttcctggcaaggtgtaagacttagattattttaaagccatggttcaaaaatcttgttatccattagaatcatctaggcagcaatttaatagtacactattgggccctaccccagaccctctggtcagtttccatagctggtgcctgagagtctatagtttaatcccatctactaagtatttgaaaagcatcagagggaattcacctcaggaagggtaactagaaggagagaggacattctggacaatgggaatagtatggggaaaaacagtatggtgtgtgggaacagctatagaaacttgattttgttagagaagagatttcaagagaaagagtagcgaagaataaagttggaacagagtaatctctcaataaatgttagctgtcatcaaatatatagaattcaggttgtaaaagacagattatagagcttatccattgctctgtaaaggactggaagtaatgaaatgctttattcaggagactgctattgtcatatttatgttttattgagatgacttatctgctgtgtgtaggatggatttgaggataggaatgaagagataagagcgtcttataggagtctccactagacaaaatccttatgggccagagcaagggttctggtagaagaagtaagtagagaggaaagaataactatttagtgggggtaaaatcaggggtatttggtgattattttcaggtagagaatgaggaagaacttaagagtagtccagctttctagcttgggtcatgtttaactgtgacaaagaaaagagggaaaaagtttcaaagggaagctgtattcagttttggatttgaagttgtgagagacacatcctaatggagaagttcagtagcctattggataaaaaagtgggaagcttgaagactggagatacaaatttggggatagcagcatgtaggtaagaattgacaaggtgaaaagtggttgaaattcctcagagagtgagaacactggagtgagaatagagcccttgtgaacatcaccatttaagaatgtagtcagagaaaaaggatagagttgtaagagaccgaaaggattccatgaccggcagaatctagaggtcatggtattccttaagcatccagtgaatgcatggactttgaagacagaacagcctgggtcartgtcttcacatagtactagttgtgtgaccttggttaagttacttaaacatctcaagggcagtttactgatttgagaaacatagataatgacagcacctacctgctagggtgtggtaagaattacttggaggtaatgtgtataaagttcttagtacggggctggcacagggtaagtgcgcaatcactgctggcagccttaggagtggcaattgatattgatactaaggagggaggccagctgtcaaatgcaacagaggtctgttcagaaaaaaatgacagttgggcccagcaattaagaggtcattggtgacattagtcagttccttttcaatagaatggtgggaagagcttgactgagtggattgaggaaggaagaggaaatcaattccttgaatggaaactattcttttaaaaatgggggagacaaggaagagagagtagaaggttacttgaggagagtatgtggaaaaaagggatttttttttttaaggatagacaagacttgaacatatttacagatggaataagatctgcataaggcaagatggaaaggacttaggacataggtagagagattggcttccagtatggaaagcacagctcatctgtaaaacctagaaagggtaaagatgatataattatggaaacatttatggatagggagatggagtgttgaaggtacttgtgtgtgattgcgtcacttttcacaattaagtaggaggcaaaaagtgatattttaagaatcagagctgaagtggcaccaaaatgcatggtcatgtgatttttttctgtaatacttagccatttggatggagtatcaaggaagctagatttgaacattaatccagggctagaatgctggtggcaaaattgaatggtgcaaaagaaatgagagcacaggggctgcggggagaggaggctgggcaatctatggagtccaggctgagtagggacggaaggaaggcctggagcagcaagtgggcagaaatggagctattgagagtcagtaatctctgcatagttgaagaaagattttgagagaatatgggttttcagaattaggataaattactgtcataatattggttattggcatctgatatttctcagggagaatggttgctggtagttaagccctgggagagagtggctataagtggaggaaaattcaggaactgtgatgcttgattttctttctggggaatgcagtgtctccttgattggagctggatttggggtgggagagaaagcctatgtgccaggtcttagtcttcagtgactagaagatggtaaaggacagcagcatggaaggccaggctgagtgttatgagcaccagggaagatgactgtattagtcagggttctccagagaaacaaacaacgggatgtgtgtctgtctgtctatctatcagtcaatcatctatctatttgatcttctatttgatctgatctatcatttatctctatataaattccttaagaatcagtcactctgtacacatacacacacacacacacacacrcgcacacagattgattgattttaaagagttgacccatgaaattgtggaggactggtgagtctaaaatctgttgcggtgggccagcagatgggagacacaaggaagaggtgcagtttaagtccatagaaagtttgctggctgaatttactcttgctcatcggaggtcagtctttgaaaacaaaagccttcaactgattggatgaggcccacccacattctagagggtcatctgctttactcaaaatccagctattccattgttaatctcattcgaaaaaaaaaaaaaaacactgtttctgtaacagagtaatgttggaacaaatattgggttccttggcccagtcaagttgacacataaaattaactgtcacagcgactctgtgcaaggattcaggaggggatttgcctgctttttctcccctcaccccaggccccagggatttatgagaatgtgtctttagtgtttgaggggcatcttataagaatttttgaaaaatttctttgggaggtatttcatatcccatagtttaacactagtcatcctatccccttatgtttatgttttactttaacatattgtcctcagtcccttcagctctaagcaagagtgtgggagaaagcttcacttattgctcattgttgccacttctcagctgttggtgcatagctgggagcaggactctggttactgttctctttcccaggtggagcataatgttctataatgtctctgcagtgtggccaccccacattgtttgaggaagtaagagagccttcctgagagtcagatctggatctcacagcatctgctggcttttgacattggcaccgtccatctggaatagtgaggcatcccctcatgccttgctgcatgtcccttcttttcagtacatactagaaaagtagtcatgtgaactggaagtaaaaagaaaatgccatttcaccagagaatctggacatttcagggggatgacatgggaatctttgtgatagaatttattgcatttcctactctctgacctttgctaactcagcattcctccctgaaagagtacaaggctggtgcaacctgatgttcagagacatggagaagaaaaatttctttctttccttgggcaaaaaaaatagctactgtgtttacttggacattactctagaccacagaataaagactgagctatataataaacctgctttgaggccctttctgtgggggatatatgggaatgagagattccagatcctccaggctcagcaattttacttcacaacccacaaggactgtagccactcagaagtagcaccacatagtcatcccagtgtccagcagcatagtgcctggaacataaagactcccaataaatatttgttcaaggaataaatgaattgaaggctttgtttattctgtggagcttagggaatatttggggctgtatgtcaggttgcatttgctgtttgtgtaagtgttagccagactagrggtagaaattccttaagatgatgaaaacacccgagattaattagcttcaaaaaataaggtgatgtaayttatgctttcctttgcagtgcctgtgtgaaagctggagagagtgttctggttcatggggcaagtggaggagtaagtattttttttaatgtattttgaaacaagcttgggtttatgggtttcacattatagttcctytggtcatttttaaaagtcrgatttataaatagagtcaaaggtgctttttttctttatgtagtaaaacttttgattttggtcttctgaaggtgatgttttgtcattagtttagcatttcttggttaataaactcaacagagcaccccttcaaaaatatgttagattttccacctgtattgggtgtagactaagataaactggccttgtttttgccttcaagtagcatatgttataaaaatatttatttagaattttaaacagttctttaaggttgatattaattccatattcccttagataaggaaactaaggctcattaaagcttacctatgttgccccagacagcacggtaaagccacactgtgaattcttagtccttctatctcccttctgctgcttgcctgctgcactttgatgacatccatggagtgcacgtatacagccctgtccttaacaccacaacccatggctgaaaatgctaatgtgggggaatgggggaggaggactcagaacttaaaataagcccttcaatgaaatcacccaatgcagggctgtcagaaacctcttcgagaaactagctgccaatctgcctctcaggagcttagagggaaaagttagagctctgcagttagaatttaacaagaaatccacatgaactctgtcactggatgctttggaaattttggagataagattttgcattttaaaaataaaaggcctggggctagatgcttactttgaggaggctgttaaccatttcagagcactgtgtattctggagagtggattgaaagaagtaacctattaaatggcacatagtcccctgaataatgagtggtatcctgaaaatgtgaatttacctttaaaagtgcccaggtaatttcagtcctttttgtctctctgtttctttaggtagatgaatcacgaggtttcacacctagcttcctacacttcaaatagatcaattctaaaggatttcacagatcaaacaatttatgaaaaaacactaggattgtctttatggggcttgagacaatatgacagatataccttgtccaaaactcccaytgtttaacttcactgaagaggctatttttgggttaaattaaatttaaccctaagtaactaaagggtctgtcaaacacatacatttatttaaattaccctggctttcagagagctaacttagtgctctgtgcagaagggaaagatttcagtaggaaggggagagaagagtttaaagaaaatctctttatattccctttaccctcttgtaaaaagcccagttgcttcaccatgatttttttttaaggtaaaatccacactgttctctgagctggctgagtttgttaaatcctcagctggcagggataggctggtgacctggtgtgtgaagtgcttctgatcctccctgtcctatcagagggaaacagtactgggttttgccttgcttctgtttgtactttctgtcctcatttaattcgaattcctttgggattatgttgtgtgtttaaaatggtgtggaatttatgaacacagctattatccagatatgttggtgaggagtgccctattttagtgttagcaaaataagtagaagaaaaatagttgacacataatggtgcataatctgttgaaggatcattgctggtataattgttgacaagaatagaataaacagtgcctttttaaaagagctattgagtgcccttttaaagcagttagaacacaaggagatgtagttacgttagctttttaaagtgtggttttattagaggtcttttatttaaatttgaaaattaaaatagaaaattaattgtgcccaccccatagtgggttgtgttttatctaattggatgtctctctcctccatcagacagtgagtttcatgtatttgtttgtttcagttaaacaaattcctgccataacctggctgagtccagcctcgttattcccatgtgccatacaatctttaaggtccacttcaggcctggaagtctgttacagctttaatctgtttctatcattatttttcatcttaattcttttcttgccgaacccggtcctccctgtaaatcactggttatgagtagcgggtgattttgcatcatttctccttccgctctgggacatttggcaatgtctgaagacatatttggttgtcacaacttggggaaggggttctggcatctagagagtagatatccttcaatacatgggatagtctcccacagcaaataattatctggcccaaaatgttgatagtgccaagtttgggaaactctgctctaaatgtatgtgacacttatttgtaccatcatttgtcatctaatcagatatatttcctagtattgttatttaagtaattgctcttttgtctatattcttaaattactttgatttctcttttatactaagcacatttatctggtattctagtgatttcttacaatcccagcattttgggaggctgggattttgccaggttgcccaggctggtatcgaattcctgaccccaggtgatccactcacctcagcctcccaaagtgctgggattacaggcatgagccaccatgttccacctaatcctttggctttaaataccatccgtaagataatgaatctctaatatatatctccagttgaacccttttgagtccatactcatattcaactgattgctgaacatcttcgcccgtaagtagatgagcactgtgcagctcagcatgttacaagtgattcttttatttttattttttagagacagggtcttgctccgttgcccagactggagtgcagtggcatgatcactgcaatcccaaactcctcaaattcctgggcccaagcgatcctcctgcctcagcctcccacatagctgggattacaggcatgcgccaccacacttggcaaagtgaaatctggagattttcacaaacttagtgttctccagtcttctcactctacccagttaatctggccaaagacataggagacagcctgtatttttctcttttcctcatctcccgcattcaatctgtgaggaagtcccattagcttacctctaaactatatctgaatttgtttattttttccagtgccaccacctttgttcaagccagcttcatctcttatctagactgttctaacagctacaaactgatcttcctcctcccattttcctcaccgctttctttgtgcctcacatgtaattggagcaacctttttaaagcctgagtcaaccagatcatttcctggcttaagctctcccgtggttctgcacaggttttaatatactcggaagcctctaccctcacccctcagattctgtgtgacttggcctttctggcctcatcttcgaccctttcgtacacgcccctccctgagacacactgcccctctttctgttctttgaccccaactgcattcccacctcgccaggttagccatggccattcactatgcccacagcatcctccacgtggctgaccggatgttctcgtggcttgttcctcacttttttcaggtctcattttttcagagtggctcttcctgatgacctaaatagcccctattcctgtctctttaacccaacagccagtcttattttttcttagcacttttatttcctgaatttattttattcattcatatgactattatcttcctccacccttagaatataagtttatttcttacattaagtaccatgtctagcacatcgtaaacactctataaacattcaccatatggatgaattagttaatttgcccatatacctatctcttctacttaaatggtggaggccttacatttgttatttagaatttcatatgcacaaagaagtcagagagcatgttctgatcatctttaaaccctgcaaacatcttgatgcagtggttaaaaactcaagttctgcagtcagactggtctaactcctgtttccatctccgcatatgacttggccaaattacttataatttgaagcttcaactttcttatctgtacaatagggacaataatagtatctactttatagggtcattgtgaggatagaataaaacaatatgtagaaattatttagtatggttcctggaatattttaaatgctcaattaaagttagctgtttttcttatttcttcatttacactcttaagttccttaaagttagggtgggtcctataggaatcttaagttcattgtatgtatttaagtgtttacaggagtgtagagaatatataactcttgggttatatttgtttttcaggttggattagcagcatgccaaattgctagagcttatggcttaaagrttttgggcactgctggtactraggaaggacaaaagattgttttgcaaaatggagcccatgaagtgttcaatcacagagaagtgaattacattgataaaattaaggtaaaattttccactgttttacaaaagtcaaactttgttccttggagacttgcgtggttttttaataygtttttaaccaactactcctttaaagctgtttgcttccttttttcagtgygatgaatttttatgcgtgttttaaaacwttatttaaaaaacagatgtctaagttttaaacttttactatcatttttgtattgtttatgtgtattaaatagaatatagcttctctagaatcttakagctataaaaattgattttttaatgcaaataacattctaagtaaagctgcagctttgtatttgcagctgtgaggtattcttaatataatttctactgatgtgaattctccatggaaggtgagatatctgtaaattacaaactggatctgtgtggcccagggaataaagttcatttgttagctggatgctttggaggaataatcactactgcatccaaaatggtgaggtggcatttatttagttgctgcatttaacrgaattcaagcagattctgaagytcttcacttgtactatattagcaatttgctaaacacttattgctttgctaatcctcaaccacttcctcacgttrgggagattagaatttcccaaatattgagtactgtgtaaattagatcattacaaatgaaggaaaaaataagagtgagagtttattaccttttttgcaatcatcttgccaaaaagccgaacaaaagcactcctttgttatacgtctggggaacctaagatctagcactgctgataccattatccaagaatattcacaaagatgaaaaatggcccgttattttaagagtatggtttttgttcagcaataatctaattttaagaccatgaggtcttgggagcttccactgactccttctgcttaagtctctcccattctcaaaaacattctcttaacctttatcttactcccctttctcttctcctctttcccacaaaacttcttgaaaaagtagtatttattgcttttacttccttaccttccaccacttctcactgcagttttgcttatagcccaagtatttatactgcttcccagaggtcactgagaagctcctaattaacagtctgctggtcttctttcagtcttcatcttgtttgatttttcaggagcatatgaccctgaccacatttctttgaaacaggttctcttcttactttcctgacttttcactttcaatctccgccctcttcatattatttaatattaatattccttaggttgtttttgcttggtctctcatcttccctggtgctagactttcatcctgatcagtctcatatactcttgtggctcccttactacccatatactgttgatttccaaaactgtctttggcctgagttcacttccttcatgccatcaacccgctagacattgctactcatctggtcgcccaagacagaaaccctcattttgtttgtttttcctgtcttttaattatcattctccctcccacccagcaagttggttacctcattttatcagtttcatctctgacatgcctttcaaatgtatttccttatctctattccactgaccaccataacttagtttaggcctcagtttctccagccttgactgttattcataactgagctaataymcccttttatctatgctgtcatctccctcttaaaaaagatctccagaaataaataaaatggaagctttatgaggagaggagttttgtctctctgttccctactgcacttgcacatgcagtaataaacccctgtaataaaaaaacaaaacaaaacaactacaaaaaaaaccccacacaatccaaatcctttaatatggcattcactgtgttttcactatctgtcccaacttacagtctcctctctcctacctcttcctctccttgccactcccccttacctgattatgtacttcagttcctcttgtatttcaatccttgtgttctcagtcccctccatctttgcttttctgtttctttggtccagactgactcagcctcaggtctagcttccccttactcattttcctttcttttggcttgggaaactcctattcatccctgagggcccagttcatcgtctctgtggaactttatctgaccatggcaggcaatcaaaccttaaccttttttctctgtattctatgatttatttctgctaatgtgttacttagcccattactttatagctatgactgtagtatttcccatctttctcactagttttgttttgagctccctatgtttgtatttgtattcctggtacctagtgcaatcccgggcacagggattcatttgtgtgtgtgtgttaaaataaaatgaatataatgtagatgtgtgtagctttttgtaagagccagcgtccaacatccaagagcccaaaagagttagtgcatcaaacagatgataaaccatttagaacaaaaccaaatgcactaaaacaacaaaaatcatgcaaaaccgaacagctaatgatatcttcttttgctttttgtttattaataaaaatggkagccccctgggggtttggggcttttgatttattgtttctttatgaaagtttattttacagatagaaaattttcagctaagtattttatactcaagttgagtctagcacctgaaaattccagacaaactttatttcactacagcaatgtatttagtacaaatttttatcagtttagatgttctggctggtaccttggaattacatcrtgattatataattagattatttaaaattttgcattattagtctcaaagatgtagcatttatatatcatttgaaacatatttctataatatcttgtacagatagtagctattttacagtttttcacttgctatcttactctacatttctcttttattatatagaagtatgttggtgagaaaggaattgatataattattgaaatgttagctaatgtaaatcttagtaaagacttgagtcttctgtcacatggaggacgagtgatagtaagtattccttttctttttttttttttaccactttaatgttttaccacaatttaacactattttacagtaatctttaactgtagaattgctgtttttcatgttaggttgttggcagcagaggtactattgaaataaacccacgagacaccatggcaaaggagtcgagtataattggagttactctcttttcctcaaccaaggtaggaaaagaagtacttctgattttggtaacttaaacattggtacagtttgcctactcaggcaagctgaaagtttgaatagatgttaaacttagttatatgactagtgggagttggtaaggattagtcaccagaaggacaactagggtgacagtataatttatatccaggtaagcataccttttgagatagaaatgtgatactagtaataatttcaggacaacaggtattttgtacactaacactgtctcaggcagatgggatttatggttaccctgtagataactactttttctatagttctggacaagttgacaaaagtcacacatttgtaagagactcttcatggtataacacttmgattctgaagtgtttttaatgyttctgaaaattaaatcatacggttcactacaaaaagaaatttgtttttccttttcttaggaggaatttcagcaatatgcagcagcccttcaagctggaatggaaattggctggttgaaacctgtgataggttctcaatatccattggagaaggtggccgaggctcatgaaaatatcattcatggtagtggggctactggwaaaatgattcttctcttatgatgattaattctttcatggatttcctatgtaattagaggtacygtctttcccccagttgtacttaccctatcttttctttaattaacattcgattccatgagcttcttatgtgaaaaaataagatttttctttagagagcagaagcagaagagtaaaatttattgtatagctagcaatatttttttatgccatctgwctcaaatcaaagagtcatcatagtaggaaatarcatgttagttgtcatttggcatgagtgtgcattccagtaattcttaattgatatttgattaattccatacctttgattaaaacatgctagttcaaaataagactgctcagtttccaagggttttcaagcctacttacctttataaaggttctctagtctctgattagccatgactgtattggactttgaacattttctgawctaaaaacctctattctaaactaatctcatttggatgtgtaagtcttttgtaaaggcaagaataaataatatccaggacaatttattagttttctcagtattttcccaaatattagaatatttacttcattattggttggctgccaatgaccccatatgttctgtgagaatagtagctttatctttgatataatacatagtctccaaataggtaatacttcgcaattgattagattttcagagtagatttagagttatctgtttttctggtgagggtcaaatatttttgttaattaagctcacaaatttgataaattaagaattatctgcatttgtctbgtaacataataatgtgtaataaagtctatagaaaattaaaacctgcttttctagtttttatattatttgcctctcatcacttctgcatagctcctgacagtwacttcttaacagtgttctatgctggaagcctttatctaaactaaatacagggatgacctcttagcaatcttgccatcaatattatattcaagaaaataaaagttcggttatttgttgtttttgtttttcttcacataagcacatacttttgtcttgctacattatgtgattgattgttttgacctgattttttctgttgaatgacaatttctggcttgaatatggaatcctgcttcaggaataaacagaaaacaccgctaatttctatagttgaaggatatcattggcttctggttgtatgtgccatggctgaagtgttttttgctattagcattttcaagtttatccactgtttcttttacaggttaactaccctgtaaaattacttaaaaaaaaagtgttaaggcaatgtcatcaacataggctggcattttatgtgcatcctaaaatggaggattcctttccatgtaaacaaggtaaaagaataattattctgtaaaagtcagtttaatctgtttgtatatttgcctcatctatagaaggagctaaagcatacagatgacttaacacttcaaaatacattgatacagtttaattaattttgaagccaaaactagccaaactgtgtgcattaactaccatatttatgatgtagcactgggtatgttctctgcataaatctctgtggttttagtcttgtcccaactttcagccaactgcattcactacttggttggtgcctgtggccttagggctactacatagtcttcagtgcccattcttgatgaaaagtagagaataacctgtataataaacaaacattgtttaactcagtcttttggatttctgttcctggttgctttgacttgtgtgacctagtcatgtaatgtattagagaccaaattggtcagcaccctgagcccaaaaaggtgaatcaacataccaaaggtcacatgactaggagattcaaattcagctgacttttttgtgggctgtcgatataaaaccataaatttaactttccaggcctctggctttccttgctcactgtacctctggcttctctaacagattattctgtgcatccattagttcaacaagtatttattgagtacctagagtctgagaaagcaccctgttggattttgaaaatacagagatatataagacagagtgcatatccttgagcttacagttgagtaaggatgagacccaagtaaaacattttagaatataagggagtgtcatacagggttctccagacaaacaagcaataaaatatattaagagatgcatttgaaagaatttgctcatgcaattatggggactggcaagttaaaatctgtagggcaggccagcaggctagaaatacaactagtttctattgttgcagtcttgcagaattctttctctgtgaaaccttagtttttgttcttaaggctttcaactgattggatgaggcccacctgcattattgagggacatctccttaaagtcaactgataattttgtataaacatgtaagtggcacatgttgactatgttgacacaaaactaaccatcacaagggtgacagacacagaggaagggcacttagtgtagcttgggatttgcagtcacacatttcatacatttgatgcatttgttagctgtctccatccatagtagctttaaccatagaggtaaaaaataggatgcttctgaaagggggaaaaaaaaaactagcatttttttaatgtccgtaactcgcctgttgagacaagaaattgtatgtgtgccaaggggcttccccaatttgtggtataaagagctttctttttctgcacgatttccaagaacagcaaaacctgtcaggtcactttgacctacctctttgcgcctccttgaccgtatctcgcaaacagaaaaacacctcagctcaatgctcaatcatttctaatgctttcatttttttagtacagtgctttaaaaagtcatttaaaaattgtcatatgacaattttgctaatccatagggcttatactgtgggaacttcctacatcccaggacaaggcctaggaaatgttatagaaagaaacgtaagttcactttggtctatgtcgacccctaagtcatacatggagacactccatgtgtgtcgttaaaagtgagtctaatactgatcccaaaattatgtgatatggatgttcattaaatgtgctaaatataactacagatcgcagtccctgatttattcattcccaacttcatgtaaaaatacccacaaaactccagtagtacaagacagtgaagagaaaaccatgtgacaaaatccactgggaatttctaacataagtgtcaatcatttgattcgttgaaccaaattatctacagagtaggcaggaaaaagccacaactcaatcactgcctctaacttgggacacaggaggtacactgcctggaaaaccaagtcccccgccgcmcacacacacacacacacacacacacactttttttttttttttaaccagaaatcatctgaactagctagaattgaggtctaggtccaccccacagtatccttcagctccttgctttcacatgcattttagagactacaggtttcagttttcagtacagctatagattaaggaggaagtggaactttgcaccctcagatgtcaccacagagaaaatcttgcaaatggattgagagtggaattgctggagaaatacaagacttgtgcaaacaacatttgtctgactctagcaaagccagataatgtaaaaattggagcagaagatgcccgtaccttagtccagcaggcactggaattgacgcaaaatattgaagaggctatctcactccagatattgatctggaagaaactgacctctcttatgggcagggaggaaggccacaagtacatctctggtatagttgtcaagagcatgggttctgaaggcaaagaaactggatttaaagcctagcactgttattgacaagctatggaatcctaggcaaattaattatttggagcttagggagctcagaattgtaagaattaaatgagataatggttgtgtagtacttagcactctgtcttgcacaaacacgtgtttaaatgattaataatcttttattttcattagccaaaaaagagtaaattgagacagaggaggaatgaagagagagcatcctgaaatatgcaaaaaggaatcccaaatgcaaatccccagaggaggtgcaaatgagcatgactgacattacagaaaacttggtcacgtgaacaaatttcataactctccaaaagtatagagaaaaagatgaagaaaataatatgatagaacaaacaaaaagcaaaaacaacctttaaattataggcatgccccctaactttcacagaataatgaaagaagtaataattaaagaaaattcctggcctaaaccaaagagctaagtttattcactgataatattaattatgtctgtgtaaaattaatgaagacctggtaataagatacatcttttaaatgtttaaatttcacatagatttggaagggagcatgctgaaggatcattatttacaattatgttattcaaaacctagaatatgcaggagaacaaacagaaaaactattgatgagttaagaaaactggttaattatataatatatagaaattaatatgaatcagtaatgattcatattagaaaattataaaataatgaaaaaagatctctttcacaattgcaatgccactactaccactaattttaaaagcggtgagaaataacttatgtgtgtaattggattgtttgtaattcaaggataaatgcttgaggggatggataccccattctccatgatgtgcttatttcacattgcatgcctgtatcgagacatctcatgtaccccataaatacgtacatctgctatgtgcccacaaaaatttttaagaaaaaacaatttttaagtagtaaaatacaagctaccaaatttacaagaacacacaggacctttaaaaagaaaactacaaaactctcatggaggacataaaggattactcaaagaaatgattcttggtcagattcatgtaaagattctcccttcatatgctagaaattcaaagttatttatgtcaaaataataggaatttttagaaacttgacaacatatttctaaaggtgtttgttttttttggtgggggagggggagggagggggagaaaaaggaagccagaaaaattaagaaaagaaaatgagctggaaccagtcccagcagatgtgaacattttttcccaagttagagttactaaggtggactcgtattagctcaatgataactagattagtggaacaaaatagagtccaggtatgctgcttccctttgcggatggtaaaaatggcttttgagtggggtgagaggttattcaataagagaactggctccccatttgggaaaaaaaataaagctaatatttgacttcacttctaacatcaaaaacttttagatgagccgggtgcaagtggctcacatctgtaattgcagcactttgtgagactgaggcgggcggatcacctgaggtcaggagttcgagaccagcctgaccaacatggcgaaaccccatctctactaaaaatacaaaaaaattagctgggcttggtggtacatgcctgtaatcccagctactcgggaggctgaggcacaagaattgcttgactccgggaggcagaggtttcggtgagccgagattgtgccactgcactccagtctgggtgacagagccaagacatggtagaatatttttataatcatgagggatgaaaagccttacaccattactccaaatcccaaactataaaagaataagcaaaataggaaaagtagaaaaagatctccaataacaaataaaaatattaaccttaaaaaattatccaaactaattagtaaatgcaaaacatcccacaaaagaaatggcatgaatggatacaagactgaatacatataaccagtgaatttatggaaggagttgttcaacctcactagtaatagaggaaatggcactcatgtactatgggtaggagtataaaattgtttctgttctggagagcagaaaggtaatgtcgttaaattttaaaatgtggatttcctttgatccattaattcactacagaaatttatcctaaagagatagacatatctggaaagatgtgccaaaatcgttttcattgcagcattgcttattatagtacaatattggaaatgacttaaatttccatcaattgaatgcttaaaatgccaatacatccatacagtgcaatgcaatgtaactattataatgacaaagtagacccatagttctagacatgcgaaaatgtttaaggcatagtattaagaggattattaataagtttaaatagcagatatgggatgtatgtagtataattctacttctatataattctttttgtgtatgcatttcaagagatgcctagtagatagttatcaaaatgatttgtcttagtgctgggattataaatattttccccaacacttttcaaacattttcaaatttattatttttaataaaaagttatttctgacaaatcagtagctaaagtctatttaggaaggataatttattaaataatattaacaaaatctaaaaacttaacatcaaaaataaaaataacctactttgaatttccaaatatgtatatatttatattatcttgaatcttctgtaattgtatgtctgtgcattcagattaacagttgtccctcagtatacatgagggattgaatccagaaccctctgagtacaccaaaatcctcacatactcaagtcccccagtcatccctggggaacttgggtatataaaaagtcagttctccatatttgtgggtttcacatcctgcaaatacacctgcctttggttgaacaaaatctgcatataagtggacccacacatttgttcagtggtcaactgtatttcttacttgtgctaataacttaagatttattcttaaaacatgctgagtaaaaaattatagtgtgtttgtactgaatttgaactaagtggatcaaaatgatttgcttatttttattttttttgaaataataaattgtcctttgaaaatattccattttattttcaaaagataaagtatccttcaggtgatgagaactattcttggggaaaactttgtgtttgcatttctagaaatgaactctcagacttaactcatagttaatacaaaacccaaaatgaacttgggcttattgatttgctttggatgtttattttgattgtagcatcacatttgaaatccaattgtaagcatcacctctaatcaaagctcttttagtatgtgtgacaaatgcattttaacaaaattgtacccatgttttatttggtgaaatattattttgcttaggaattaacactgtaattctgtttcacagtttatccatgtaatttcagtttttacatgtcttgcagtttctttcatcctagagtagcttttgagtttattagctggtttcacttagtcttgtttataggcctatcactatagcttctaagtgcttctcagattatgttcccttttatgtctatcaaactgtgtttccacataaataaaaacr

SEQ ID NO: 94975 - DNA, 40585 bp, Homo sapiens
tgtcattcctacttgattgtcattggcaattcctccctctcatggcctccaagtctctccctatagcctctaccctacctgagatctcgcctttcacatcccaaggctcatccttccatatgctctgcttccccatgggcatgatctctcctccacccatctctgcaaagaaaagggaccaatgtggagattatttctctgctgatatgaagtatgctgcccctctcctgaagttaatttcagtttcatgtcacattttttttcctttgtaactttggtcattgttaagacttagtacaggtttggtttccttgaactaattttcctgacccactacccctaaccttcctatctccaccctattctcatcagggtaaagtgtctatctttttgcaagatactaataatacatgttttagaaacctcttctctcctagaagactacataattctcaaataaagaaaccaaatcttatatgtttatttaatgcctcatttcctgacaacatccctttgataattatgtgcataataaatgtattttaaaattttcataccttagaaaaatttgcatgtcgagagggcaatctttaatgtctttttaacccttggaactcctaattattcatcaagatttagcttaattttctgtctttcatgaaactttctctgagtccctataatactttattcccacctttattataacaatacaatattttcttttcttttttctgggcatgggggtggacagagttttgctcttgttgcccaggctggagtacaatggcacagtctcggctcactgcatcctctgtctccctggttcaagcgattctcctgcttcaccctctggagtagctgggattataggcgcccgccaccatgcccatagtttttgtatttttagtagagatggggttttaccattctggccaggctggtctcaaactcctgacctcaagtgatcgaccagcctcggcctgccagtgttgggattacaggcttgagccaccgcacctggccaaaattattcttctttaatgaccaggttgtcgaatgaatttagaaattttattaaccttcacaattttggcgtaagagcctgttcaaacacagctgcactaagctaaattacacaatctaaatcattaaagtagttggataagtgtcaaaacttctggagggattccacattgacttcattttacttaaagcacatttcaaagcgaacaggcgttggtaacaaagatctctactagaactgaacagcaatacccccaaggtatgcctgtatgtagtgtttcactaacatttctggccacagagccatttgttcattacaaacttttctagggacacagtttggggtggttttctattaaatatgtcttatatggccggctttctttttcctagataccacaatcttcagtgtgagttcattttttctcagatttctctatatgtcttcattgtcaatccattctttttattggtaagcttaaattcagagcaaccccgttagttcctttatcattgttctcaactggagttgttgttttgtgattggaaatatgtggggttgtgcaactagccaccagggaagatgaatgccctgcaattagccaaacagtcccgcaacatggagaattgctccccctaaaatgttttctctctgatatgaagttataagcaaaagtcaagagcttttcaattgctgcattactagttgaataagacatctgcatgcctggatagtgcaaattacctatctttttttttttaaatctctgtgccacttatgaacattgcaaaagatattgcttactttctgtattgggtcacacgacctctgcatagtattcctcttcaaaggtactgcaaatatcagttttgatagaaaaatatcaaaagtagctctctgacctaagtgcttcccatttattctacttgccttatacccctttcctggcctgccagatgcttttaagaacctatttttgagaactgccaagtattattttacccattttacagaagaaagtgagacttacagagattaagtcaattgctccctcaaggtcacagagacagcaggttccagaggtgagcttcaaacccaagcattctgactccaaacttcaggtgcttaactgctatgtctgagttgttatttatattatgtttttcagtcatatttgactccttttacatcattgtggaatgcatccaaatgattttgggattacttcttcatcttaaatgtctgaagctgtactcaattctcagcctagatactcgctatattaatatgagtatgtcgcttatcttctttgtatctatcactaaaagaaagcaattgtgctagaaatttgctctccagtgtctcttgatattaactttaataattccatcaacaatatctagacctttttattctcaagacatataattttcaattatgccatatcaaaacataattgatatgattgcataatatctttttgttactattttaaaaaattgtttccaccaggaagtgaaggtaggtgtcataagtgctatctggcttggtgcagtggctcatgcctgtaatcctagcactttgggaggccaaggcaggtagatcgcttgagctcaggagttcaagaccagcctgggcaagatggtaaaacttcatctctacaaaaaaaacccacaaaaaattagcctggcatggtggcgcatgcctgtagtctcagctacttgtggggctgaggtgggaggatcacttgaacctgggaggcagaggtttcaatgagagccaagatggcaccactgcactccagcctggggaagactgagaccttgtctcaaaaaaaaaaaaaaaaaaagtgctatctgacaggctttggcccattgtagtaatctacaagtctaccaaatttagatcttatattgtaatatcttctttcccctgatccccaaattcccttcataattctcattatttcattgacaaaagcccaaggatgaacaaattgttttcttttgaggtaaaacaaaacagatctaataattgcgtatgtttatgcttgataataataataatatattttatgaacatccctcccaagtcccgattgcactgttttgatattcagtcacggtatctttattcatagcctgcctttaatgagaatagtagaggtctttgtgcataaacacaagaagtacagtgctattttcatagtgtttaagaagtacttattataaaataatgcactctgtgttttataaaaggatcaaacagtaaagaaatataaaaaatgagaagtttcccatttcctctaaaatatctgcttttgctgaatctccttcccaagaagaattaataattcttctgtaagtgttatgatattttgttgtatgcaacataatttatatgaaaaattagcacacacctcaaactatataccatttattggatttaaagtggctatcatttaatcatttaaaaagctttttttctaaatacagttgtctttctaaaatgtttaaattagggtttttggtagtattattattgttgaaaaggtaatatgtgcccatgatataaaacttgaacacaaaagagaataaaatgtaaagaaaatcacctttccactgcagatccatagtctctatgaccagaaggatttttatacatatgaaatcataaatatctgtctgaaaataatgcaacatagtatatattcttttgaaaaagtggaagcatgatgtatacgttactttgctttgctgtcttagatattagagatcaataggccaggtgtggtggctcatgcctgtaataccagcactttgggaggccaaggctggtggatcacttgaggcaaggagttcgaggccagcctggccaacatggtgaaacccatctctactaaaaatacaaaaattagccagacatggtggctgcatctgtagtcccagctacttgggaggctgaggcagaagaatctcttgaaacctggaggcagaggttgcagtgattcgaaatggcaccactgcactccagcctgggtaacagagcgagactctgacataccagcacatctcaatctcttcctgcttcttggccatactgtagccatcacagagtagtatcataaccagttaaccagtcttttaagaatgaataattaagccatttttcactcttttgctattaaaaatagtaacgtaggtttaaaaagcatccttgctcatctctgtacacatattaagaatatatctaaaggataaattcctgcaagtaaaattttctacaaaagaaattgctgagtcatagaaaggggatattttaaatccttgatacatattaagctgcatccaataaagttttctcagtttaagagagtaaaaaaggcctgatttatagcatttgtattgggtgctatcttttttttttttttttttgagatggagtctcactctgtggcccaggctgtagtgcagtgacatgatctcggctcactgcaacctccgcctcctgggttcaagcgattctcctgtctcaggctcccaaggagctgggattacaggtgtgcaccactacgcccagctaagttttgtgttttttgtagagatggggtttcaccctgctggccaggctggtctcgaactcttgacttcaggtgattcgcccacctcggcctcccaaagtgctgggattaataggcgttagccaatgcacccagcctagtgctgtcttctgaatgattctttattacagtacactaaataaaatgtctgtatttatgcaactcagggtttgtcagcaaatattaggaggtaaaactaattggaactgttttagacccttttggcccctaaatgccatatcatattacacaaaaatacccacctatagttatacataaatattgaggtgagttgcagttgatgttatatttttaaaagaaaaatattaattaaatatgtattaatatacattagtgttttgaagtctatccattttttcccccagccatacaaagtttggtaggattctaaaagcttgtaggccctcaagcaccactcttctagtgcttaatgggttaaatgtccctaaagctaatttgaaaagcaaattgcctcattctttctcttcatatctttctttcaaactgtaaattttaagagctgtttattccttattctccttgttcttaatttgtttaataaagttttagatctttagcgaatattttgcaacaacagaaatatccccaaatttcctggtgctagaaaacagccacaatagtaagtaggtcaagtctgtattgcttagggaacagggagatttttgttttaaagcagtgattcttctgagagtagggctctgggcgcaggtgagtggtaaacaatcctttttcctgcagggatgttgctgttgtgtaaaagcaaaagcattttgtgtaaggatgttaggctccagtaagtatttcaaagccacattatctttctcattagggggagtttctctctgtactttaaaagaagataatgatgcttgaaaaagctcaagattgactaacttttaggaagctgccagagttgtgcatagacgtcctcactacagtagcttcgttatgtcttacgaacaatttaaccttcacttctagtcatcgtttcgtcatcgtaagcactgggtcattacagagttcagtgtacctaaaacgcaagctgtgactgatgagaatccaagctgcaaactgggcggcttgggcaactgttttcttaaccaccctccacgttgtggcttacgtcttttagcaccgccctcagggcaaaggatggtggtcagaggtaactaccacagtaaaagaaggctatttatgtggtctgtttacagttacccggtttcaacactaagccagctttccgccacgtctcgggcgaacctccggcctgaggtcacagagacgcccgggtggctctcaggagccagcatggcagcctcctcaggacsggtactcaggaatttcgcccgcagggactaacaccacttggacccaggractccagcttcactccgctttgtgcactgggtggggcggtcgcggtgacgtttcaggcaacgcctctgctgtcagccaataaggagcgggagacgcgtcgggcctgcgctcaatgggccgcgctggtcccgccccactgtgatcgtgagactgcagacccgctaataaaatccaccccaacaatcgctgtgtgccgctttagtgcgctcgccgtcggctctacctgcgtgctttagctccttctcgcctgatccttctgtctctcccaaccccggacacccggcttcgactggttatatcttcggtgttcttttcctctcttcttctttcgcggttcagcatgcaggaaaaagacgcctcctcacaaggtttcctgccacacttccaacatttcgccacgcaggcgatccatgtgggccaggatccagagcaatggacctccagggctgtagtgccccccatctcactrtccaccacgttcaagcaaggggcgcctggccagcactcggtgagctgggtctgtctggggctgtccacagttgggcggtaaaagagatacggcttatgaatttgaaaggcatgtaagtaatttataatatgacttataaattaggaaggcaaccgaaagatgtttctacactgtaattcttgcagcacagctttgtatcggatggtccagtgatcgtatttcttttgataagcaggactggaaggagccgtttgtccagcttgccatwtagatttggcctgaaattcaggtgattttgacaaatttgcaattaaaaatcgaaggtcataacttttttgagttacctttagcagcataaattttaaagatgtagtacggagtcagcttaaaaaatattaagggtctgataacttgactagaattaagattgtttccagtagctgtatgaatagttattgagtacctactatatgccaaatacgtgctcgtatatatcatgtgtattacatgtattgtctcatctaatcctaacaacaaccctagtctgaaccraattctcattttttcccaataaagaagctgagatttagggagttaagtaactagccttagactagtaagtattggagatggaattcaaactttagaaacttgaggttgctttaggaaccaactcctaggcactcagctacactatgctatctctaataatgctagtaacaatttagcctattgcgtcatttaagcactgtggcttagtgattaagaacacaactcatgaccgggtgcagtggcttacgcctgtaatcccagcactttgggaggctgaggcgggtggatcacctgaggacaggagttcgagcccagcctggccaacatggtgaaaccccatctctactaaaaataaataaattagctgggcatggtggcgggtaatctcagctactcgggaagctgaggcaggagaatcgcttgaacccaggaggcagaggttgcagtgagccaagatctcaccattgtgctccagcctgggtgacaagagtgaaactccaactcaaacaacaacagaaaaagagaacacaaatcttatagtcaaaggctaggtttgcattctgacaccacttcttctgagctgggggaccttgggcaagttagttaacctatcaaaacctctgactgatcctgtataaatggggataataatagtatctaccacataagttgttgagatgtatttaaggctgtatagtacataataattactcgatggtaatttgttttttcatgatgttcacatttacactatttccatttgatcctcacaacaaccaggtcagaaggcaggacaggtattatgtactttttatagaaaaggaactgacacagagtcatacatgaatgatctgtaaagcctacgaaggagccctctttgttaatcacatagcttttttcccccttttggtggcatacttgatggatcttagagaatttaaaagttgctgagatttgtaagaattagttaaagtctgtaagtccaaagccttgattatgctttggaaaccacttcagtgtgttatataagttgaggaaaatccttacagacagtcccttgttttgtgagatasagttctaaggccatttctacaactggtttagaatactctttactgtattttagaatcaaaatatgtacacagcctctctttctttctttcttttttttttttttttatttttcagagagagtcttactctgtcacccaggctggagtgcagtggtgcgatctcggctcactgcaacctccgcctcccgggttcaagcgattctccggcctcagcctcctaagtagctgggattacaggcgcctgccactgcgcctgactcattttttattttttttagtagagacggggtttcaccatgttggycaggctgctcttgaactcctgacctcgtgattcacccgccttggcctcccaaagtgctgggattacaggtgtgagccacggcgcccggctcacagcctctctttcaaacatgcagttcgtttcttgtgtagggtttaatgaaagtgtagctgcccaagctttggaacttagtgcaaaagtttaccattcaggtgtgatattaataattaaatgtttccaggaagccagcagggatggttaaatccacaaaaactctgcttaatatcttttttttttttttttttttgagacagagtcttgctctcttgcccaggctggagtgcagtggtgcgatcttggcccactgcatcctccacctcctgggttcaagtaattctcctacctcagcttcccgagtagctgagattacagctgcccgccaccatgcccagctaatttatttatttttagtagagacggggtttcaccatgttggccaggctggtcttgaaatcctgacctcaggtgattcacctctgaaagtgctgggattacaggcatgagccaccgcgcccggccctttttaaaaatcagctaagaccactaaagggaatttgaagagctgaatgagaaacgggaggtacctttctgtggcagaagccacgtgaatccaaacttttttttttttaatctgcagggtacagctgcaggtcatggtaagaaggtgatggtggggaggggtaaggatatcctggagccctataaaatatgtctgctcaggttgggcgcggtggctcacgcctgtaatcccagcactttcggaggctgaggcgggtgggtcatgaggtcaggagatgaagaccaacctccccaacgtagtgaaaccccatctctactaaaaaagtacaaaaattagctgtgtgtggtggcgtgcctgtagtcccagctactctggaagctgaggcaggagaatcgcttgaacccgggaggtggaggttgcgccactgcactccagcctggcaacagagcgagactccctttcaaaaaaaaaaaagtctgctcaacttgtcataaacaagggcacatagcaacaaaacttttagaagttattgttgttaatactgggagcttctgaatcagaaacaaaggtgaaagagtggttgtgttttgttatgttatgtgaagcagagggagaaaattataggacttctaattaatgttcgaatccttggttcacaatccggttttgacactccctaggtactattgcatttggcttcactttcctcaaagccagtcataaggattagtagaatgactggatgaatatagctagcagggtgccatatatgtaaaaggagaataatgcaatttttttttttcccgagacagagtctcgctctgttggccagcctggagtgcagtggcactatctcggctcactgcaacctccgcatcctgggctcaagcaattctcctgcctcagcctcccgagtagctgggattataggaatgcaaatttttaaaaagtattgtgtggagctgttttgccaggaattgctccctatgctttgagccactyttgtagagccaagatgtgaatgaatgttgagcattggtaggatgtgatcataacttcctgttgtatgctaaatagaacttgaatcagcctgacagatggctcactcctgtaatctcagcactttgggagaccaatgtgggaagattgcttgaggtcaggagttcaagaccagcctgggcaacatagctagactgcctctacaaaaaataaaattaaaatatttgttaggcatggtgacatgcacctgtagtcttagctactcaggaggctgagatcggaggattgcttaagcccaggagtttgaggctgcagtgagctatgattgccccaccgtactctagcctgggcaacagagtgaggtcctatccttaaaaaaaaaaacttgtatcacttaatcatttatttcttaggaaatgaaatacaggttagaattaggtttattctgttggctcatgcaagtcccttttcctaatgtttccagattaatgaaaaaaggtgagtctaacataataaacatactaataataaaaactgycatttatttagtgattagcatgtgccaggaaacatgtagtgaatttgtgcattatctcattttatcttcacaacaattttatgaaccagatatctgtattttattcccattttacagatattgagattgactcttggaaatgtgaagtaacttacctagtgtcatgcagctcataagtggcagatacagaattcacatagagtttgtttgacttcagagcatcttgactatagccacagcactgttctgcttctgtattaaagcaagacatatcatgactaaagaatagaaactaattatggtagggtgaaactatagttctctatgttaggactctgataataaactgaaatctcttaggatgaactcgaacttgtttttttcagggttttgaatatagccgttctggaaatcccactaggaattgccttgaaaaagcagtggcagcactggatggggctaagtactgtaagtaatttccatttcacagtctagaatctatttttaaatgtatagagaaaaccatagaggcacagaatgtggaactgaaaagaaacagatttgctagttcaaaattcctgttctactgcctttgaattctttgcccaaggtccctcagttggtataatatgcatatgtgtaatcatcaggtaaaaatacrtatgaatagaggacaaatgaataaaggaaaaaattcacacgaatactacatttattaatactacatttatcatgtagtattcatgtgaaaacaatcttcatctgaaactgtcagtataaataaataaatggaaattaaatttaataacaccacctattagaatataaaatctttttttgagacagggtctctcattctgttgctcaggctggagtgcagtggcacaatctctgctcattgcaacctcctcctccaggattcaagcgattctcctgcctcagcctcctgagtggctgggattgcaggtgtgcaccaccacaccctgctaatttttttttttttttttttttgagacagagtcttgctcttgtcgctcaggctggagtgcaatggcaggatctcggctcactgcaacctccgcctcctggattcaagcaattcttctccttcagcctcccaagtagctgggattacaggtgcctgccaccacgcccagctaattttttgtatttttagtagagatggggtttcaccatgttggccaggctggtctcgatctcctgacctcgtgatctcccgccttggactcccaaagtgctgggattacaggagtgggccaccacgcccagccttttttttgtatttttagtagagatggggctattttggccaggctggtctggaactcttgggctcaagtgatctgcccacctcggcctcccaaagtgctgggattatagatgtgagccaccacacttggcctaaacttgcttatcctctggtttattcacctaataatttgtgcctgagaatagcactaaagttattttcagtggtcaataactcctgataatgtgctgtcagagattagagattaactccctaaacttttttttttaatgaagagagtcttgtgtattcattgtgattacacttatcagacaaatctcaggtctgattgcgagttttgttaaaatatttactgaattgcatattcatataattaacgtatgaatcatatctttgctctattctttatgtttgaaatttctcttttctttcttttttttttgatatggagtctccctctgtcacccaagctggagtgcagtggtgcaatcttggctcactgcaacctccacctcctgggttcaagcgattctcctgcctcagtctccctcgtagctgggattacaggcatgtgccaccatgcctggctaatttttgtatttttagtaaacacagagtttcaccctgttggccaggctggtcacgaaatcttgacctcaaatgatccacctgccttgggctcccaaagtgctgggattataggcattagccaccacgcctgccctgaaattcctttagtttgctatttttaaactgtagtttaactggcaataggccttttatctcagatatttgtaaagaattattttcttgaagtgtttcagagaaatattattaccaaggcaaaattgacttaacacaaaagtatctgtccacattatatattttttattttaaagatatcttattcttgaaatagaaaaggagattttgtaatggtattaatcaggggcctctagcaactcagcagtgatggcttcctatctgcattaaagtaagtcaggtaaatacttggaggtgtgttgtaacctataggcctgacttttcagcttactctaacttgatttttattttaggtttggcctttgcttcaggtttagcagccactgtaactattacccatcttttaaaagcaggagaccaaattatttgtatggatgatgtgtatggaggtaggtracccctctcatttatattctgtaaacttgtattttacagataataaagtgagccctgaattaatattaacaatgttgccagtatttttgattatttattatagtttacaggtgtgacrggtacctctatgctctctcagacttgggaaaagaggagcataaacacttagggtccatgttctggaactgcttataagagagattatttatttatttatttgtttatttttagataggatctcactctgtcacccgggttggagtggagtggtaygatctcagctcactgcagtctccgcctcctgggttcaaatggttctcatgccctagcctcctgaatagctgggaccccaggcgcatgccaccacacctgactaatttttgtattttttgtagagacggggtttcgttgtgttggtcaggctggtctggaactcctgagctcaagtgatcctccctctccagcctcccaaagttttggaattacgggcgcgagccgcctcacctggccagagattatttactaagaatagtatttaaggtgctagaatgaatacgtagcacttgatcaacttgcagacatattctgctctagagaagataaggtttagagagacagtgttctcctgtaacttaatttttacctgtaataaagatgaaatacaactcaggttactctcaagagttcaaccccacacatccccttttgctttttattttttgtttggcaccagggaaactttcaaaaatttgttgagagatatgggcctcttttcccaaaaaatgttcttaagactacactgagtgattagcattttaattttaggggtctcatggattgaaccgctgaagcccatctatggctctaaatttaagaacttcccattaactcttcatttagcattaggtatatctcctaatgctatccctcccccctccccccaccccacaacagtccctggtgtgtgatgttccccttcctgtgtccatgtgttctcattgttcaattcccacctatgagtaagaacatgtggtgtttggttttttgtccttgtgatagtttgctgagaatgatagtttccagcttcatccctgtccctacaaaggacatgaactcatccttttttatggctgcatagtattccatgtgtatatgtgccacattttcttaatccagtctatcactgttggacatttgggttggttccaagtctttgctattgcgaatagtgccgcaataaacatacatgtgcatgtgtctttatagcagcatgatttataatcctttgggtatatacccagtaatgggatggctgggtcaaatggtatttctagttctagatccctgaggaatcaccacactgacttctacaatggttgaactagtttacagtcccaccaacagtgtaaaagtgttcctatttctccacaacctctccagcacctgttgtttcctgactttttaatgatcgccattctaactggtgtgagatggtatctcactgtggttttgatttgcatttctctgatggccagtgatgataagcatatacctaacgctaaatgatgagttaatgggtgtagcacaccaacatggcacatgtatacatatgtaacaaacctgcatgttgtgcacatgtaccctaaaacttaaagtataataaaaaaaatttaagaacttccattccaaagaaattaaatgttagctatttaaagtggtgaatgtggagaagacaggcttgcccttgcctttaagcccactgatttttgtatttaaaacaaaagcaaggaattttgtgaatatacatatacatatattccagatgcttccaaataattaaaatgtgatttctagaatattatcattttatctatttcctatctgaacaaaaagttaaatcactaagtcctttaaaacagcagttcccaacctttttggcaccagggaccggcgtgtttttttttttttttttgaggtggagtcttgctctgttgccaggctggagtgcagtggcacgatctcggctcactgcaacctccgcttcccgggttcaagcgattctcctgtctcagcctcccgagtagctgggattacaggcatgtgccaccacgcctggctaactttgtgtttttagtagagccagggtttctccttgttggtcaggctggtctcaaactcccgaycttaggtgatccacctgcctcggcctcccaaagtgctaggattacagatgtgagtcactcgtgcccggcctcagggactggttttgtagaatacaatttttccagggacagggggatggttccaggatgaaactgttccacctcagatcatcaggcactatttagattctcataaggagcatgcaatctagatccctcgaaagttagattctcataaggagtgcacaacctagatccttcccatgagcaattcacagtaggtttcctcctgtgagaatctgatgctgccgctgatttgacaggagactgagctcagggagtcatattgcttacccgctgctcacctcctgctgtgtagctggattcctaacaggccacaaacctgtacctgtctgtggcctgggttggggacccctgctttaaaggaagggacttactcttagtaatcattttatccctcagaaatttgcacaatgtttygtattttatcttagtttcttatattagcttgttgagttgaaattatagaaatctgaaacctttagatacttttataatgcaatataaaagtctcatggcaaacataggtataaaatcctgaaaattgttgattttaaagaactttttacattatttttcaattttatattacctagggtcagtctacataccatcaaaagtctagtttctcattaatgacagaatattcttttgttgttgttgttgttattgagtatcaatatcaatttyttctttaagtttttatgtgtaaaaatcaaatctaggtgtatttataaaaaattattttaagtcaaatgatttaccttgtttcactgtaaaaatctggtagtttgatttatattgtctcattttatcgattaaaactttcagaactacataacaaaaagatcaaaaaagtacaaagaatagtaaccaattcttttccattacaaagtatattgaaatttattttgaacctttcattgacattgattcatttagtttagagttgagaactaggtagaaattgtttgaaaagatatgatgtttcaggaagcatgtcacttagtggagattggatgttttgaaaaacattatttgcttcatgctacttttggatctcaagtgtgttttatttgactcttgagcctttagagaacaaaccttattwttctttactatatcagatagccraactatttaaccaaactagaattgcttttagttgcattttccttggtgactgagagttccatatattttgtaagtgtttatacmtagaaggaatgaatgtttcttaatgcaatgttcttttcattttatctgattcccttctgtctcaggtacaaacaggtacttcaggcaagtggcatctgaatttggattaaagatttcttttgttgattgttccaaaatcaaattactagaggcagcaattacaccagaaaccaaggtaactcagctcattttcagttttgcctgtttttccttcgatgttttgttttcatcatttctgtttactagaggatataatttaatgtgaataacaaattttattttatgccattggaaacatcaacaaaattaagatagactgtcatctccggggtgttatagcataatggtagtacatgatttctggagtaraattcaaattgtgattctgttatcttagttagtatattatcttgggcaaattatttaaccaaagtctcagtttcttcatttgcaaaatggagataattataccggttttatagaaacgggagtgtgagaatcaaatgagataatgaatatgaaatgcttagtatagttcctggatacatggtaattgttaaaaaaatttctatgcaggagcacctaatttttaactgcatagccaaaagagtattggtaacagaagtcatcacagagattggactatagaaaaagaagcctgccaaacccccaaactcgaagcacagtggctttgccgggctgtaagggatgctgcccagatactagttagatgtggagaataggccacaagcaatctttagcttccatcctgggaaatttgtatgccaccggaaggtgttttgtgtctgagtgaatggcatatgtgatattctttcttgggaccttatttaaattctgtgtggataaaagaaggaccagtgtcttttataagtcagctgtttacaactttttgctaaygattaaaaggttagaattgtacccaagattatgttgcaatgaatgctaaaaaataaatatcttttcatgtacaaataattactttgcacattaacatggttgagcttttggtaattaaggtttgtttccagaagaacttgttttttatcttgcttgggagaaaagtcacattaaaatagctggtctgagtcttttttttttttttttttttgagacggagtctcaccctgtcacccaggctgtagtgcaatggcgcaatcccagctcactgcaagctctgcctcttgggttcaaatgattctcctgcctcagcctaccgagtagctgggattacaggcgcccatcaccatgctcagctaatttttgtatttttagtagagatggggtttcaccttgttggccaggctgatcttgaactcctgaccttgtgatccgcctgcctcagcctcccaaagtgctgcgattacaggcatgagccaccgtgccgggccctggtctgaatctttctaagggaggaaagcaaattatgagtacagtaagtcttgtcaacagaattttatatagtgactctaccaacttgaattaataccttttccttcctaaaatatcaggtttttcacttgaagtagaatgtttaagtccatgtaaaacctactttttatttatttggtaatttttattttttttattatcagtaggaataataaattcttaccaggaataatttttatagattctttaaataattcaagatttttgtagaatatgtattatttaaccatcttatcttttccagagtaaaactctaaagtcagaagagtttaaaccagatctcttgcccatttaaataacaggtaataaaaaaagaatcagctgggcacagtggctcatgcctgtaataccagcactttgggaggctgaggcaggaggatcacttgaaccaggagttcaagatatatagcgagaccctttctctgcaaaaaaaaaaaaataataataataattggccgagcatggtggcacatgcctgtagttccaactactggrgaggctgaggtaggaggatcacttgggcctgaaaggtcgaagctgccgttagctgtgatcatgccactgcactctagcctgggcaacaaagtgagaccctgctgcttaaaaaaaaaaaaagaaagtaattcagtacaatggcatttcgttcaacaaatagaattcttttctttggtctttttgataactatcaagcatctaccatgtgtctgaattgtggtaggttttgagatataaaggtcattgttactttttaagtaggcggtaaccacgttttctgttgtgggtgtcacttttcttctttagtctaaagcccatgctcttcaagwcttagatacttattctatagtttctagagtttctggcattaagttcatattaaatatatttttggcatcatagggataattctctttcattaaaattctaggatgtattcttacacaatctatgttattcatctctgagacaaaatttccagacactgagctgtctttggaatacactttcttttttaagaaaagtacaataattaactttagtacttttctgtttacatgtacgttatctcacttgatctttacaaaaaattctgtaagataggtattaccaacccaattatacagatcrataggatacattacatacctacggcttcagaaatttgcaggtaaggctgggattcagatttgaacctcccaacatcatcatccatgtgtttccattatacaatgtagcttcccagattgttacaatatatgagatgtatgtttgtaaagtatatttttacaaactactgttatttgctgaattattttagcttgtttggatcgaaacccccacaaaccccacccagaaggtgattgacattgaaggctgtgcacatattgtccataagcatggagacattattttggtcgtggataacacttttatgtcaccatatttccaggtaaatgaaaataattttttttggcacaattagtagaccacatatatctgtaattaggaaagaaaggacttgcttaaattaaaatcatgatcaaattcatgaaatctaatcataattaattatttactggatcgagaattaaatttggacctcttctaccattagttaatatcttttcaaacctatgttaatatcctctatgttactttgtgttttttatttattaaagcttaccagttctcagggctgtgcgtggtggctcacgcctgtaatcccagcactttgggaggccgaggcgggcggatcaggagatcagggatcaagaccatggtgaaaccccgtctctactaaaaatacaaaaaattagctgggcgcagtggcgggtgcctgtagtcccagctactcgggaggctgaggcaggagaatggcatgaacccgggaggcggagcttgcagtgagctgagatgacgccagtgcactccagcctgggtgacagggtgagactctgtctcaaaaaaaaaaagcttacgagttctcttagagtgtgtaaactctgaagaaatggccttattatgtgattgtatctgctaataccttatgcatagtaaggacttgaatgtttatgcattgattacaaatcagtcatatttttcagtcaccttgaatatttttatatatattctaaaagaaaagtgatgctcaatgatttcagtatatattatacatattatttctcttcttctagtttttattccttcagcactccatatactatgcctagatctctttaacttattattattttgaacttttactttatttattttacattatagctgtaagtatttatagtgctcttatgttagtctctttgggtggccataacagaatactataaactgggtggcttacaaacagcaatttatttctcacagttctgaaggctgggaagtcctcaatcaaagtgccagcagattcagtaccggtgagggcccactttctggtccatagatggagccktctcgctgtgtcctcacatggtagaagagacaaggcagttatctggggcctcttttatcagggcactgtattagtccattctcacactgctataaagaaataatccgagactgcgtaatttataaagaaagaggtttaattggctcacagttctgcaggctgtacagaaagcatgatgctggcatctgcttggcttctggggaggcctcagaaaacttacaataatggcagaaggcaaaggggagcaggcacaacacatgaccagagtaggagcaagagagagaacgagggggaaggtgctacacacttttaaacaaccaaatctcacaagaactcactcacaattgtgaggacagtcccaaggggagatgactctaaaccattcatgatatatccaccctcatgaactaatcacctccctccaggccccacctccaacatttggggattacaactcaacatgagatttggtggcgacacagatccaaaccatatcaggcaaaaatcaccctaatcacctcccaaaggcccacctcctaatcatactagtgattagatttcaatctatgaattttggaggacacaaatgttcagaccatagcagctctctttaaagatttctttcgctacctagccccctctgcatttgtttcctccccagaccacccctcccatacatctatcctttccttttttctctgtcttgtgtctagtttcatcctcttttgtgtttcactttcttttgtagatcactttgggatctctttataattaacttgtttcctgccttttccacacaagttctccctctctttcctctgagtaacccaactctttcctttccttgttaggagataccttcttcctgctcttttcttcctgcctgtaccttgtcatacttagtacacttcctgtagttcatctctattctgcagagttcctgaaaaccagctcattttctctggctcttcaattgggcagatgtttacaggttttattgtttacatttccccccttctgttctgggtccctgaagttgatccaggttgctgcctccatgtgactggctgactccctgggcagttggtataaacctgcttttcaccttcctccattttattcgaaggcattgtcatggtttattttcctttcctgaagcacacttcctggctacattgcattcagacaccttcgtgggccatctgcctttggctcataatgtatctttgattgctgattttatcaggtaaagcagtctgtttcccagtgaaaaatcttctggcattgtctatttggcatcttctatttgtcccaggtggttttcagtgtaagattccttatcgcaactccttagcccatatgccacttacattaggccagttaatacagcataggatagctttagctgagacacagtgagtcctgtatattcccaaaaagattgcatacgttttgtagcctggacctgcccgggttactcatcaaacctggccctctttctcctattactgtcactaacataggtctagtttttctacctttttgaagcccacatcacattccgcatgccaatgattggaatttgcttcatttcaatttggatttattccagctgaaatactcagaatcgcatcatccctaagtagccacatgtgttgtttccatgaagcaaatcttcctgaaaaaaatcttctcattgtcttaccttaatgaaaatggaatatattctctttcttcccagtcttttgtcctctggatcttctgtaagtctcacgaaaggcaaaatagacctaccatcatcaagtttcagagtagcacctctggagtcaggcagtctgggtgtgagtcctggctctaccagctttttaatctgagggatctatctcatttttcttagtcccctttcctcacctgtatgatgagagccataaaggtactgattttattgagttaggtattttgtacactgcttccctgggttatataaagtacgtagcatgattctcagaagataatgagatcagaggtgttagtgatttggtttttatttttccttctcttttggctgtagagtttacagaatgttagcactagaaaagaccttaggcctcacctactttgaccccatccctttaggaaccctaaatgaaaagttcccatagccacctatactaatatcttccaaagactaaacagctctaatgagggtgaaataaaaacacacagttctatgtttaggaaaatgtaaagggaaagatgttgataatgtatktttttgtttgtttgtttgttttgaaatggagtcttgctctgtcgcccaggctggagtgcagtggcgcgatctcagctcactgcaaccaccgcctccccggttcaagcaattctcctgtctcagcctcccgagtagctgggattacaggtttccaccaccaccccccgctaatttttgtatttttagtagagatggggtttcaccatgttggccaggctggtctcaaactcctgacctcaagtgatccacctgcctaggcctcccaaagtgctgggattacaggcgtgaaccaccactcccggcttgacagtgttttattaagtggaaagtctacacttttcactctggttgtaaacaaatacattttaagactacaggattaacctagaggacattatgttaagtgaaataagccaggcacagacagacatatatagcatgatctcattcatgtgtggaatgtaaaaaatgttgatctcatagaagtagtgaatagaacagcggttactagagtctggggaagggagggtggaggtggggaggacagaggatggtcaatgggtacaaagttacaattagaaggaggaatagaggaataagttttggtgttctactgcacaaaaggatgatcatagttacaataagatactgtatatatcaaaataggagagaggattttaaatgtttctactacaaagaaatgataaatatttgagatgatgggcatgctaattaccctgcttttgatcattacacaattacacatgtattgagcatcacattatactccatgacttaaaggattaatttacaggaaaattgggtgaaagaaaacacttttaaaaattccttttcatttttatttttcttaattctcccagtttcagacatatttatttatttatttatttatttgagacagaatcttgctctgtcacccaggctggagtgcagtggtgtcatgaaaagctcactgcaacctctgcctcctgggttcaagtgattctcctgcctcagcctcctgagtagctgggattacaggtgcgtgccaccatgctcagctaatttttttgtatttttagtagagatagggtttcaccatgttggccaggctgggctcaaactcatggcctcaagtgatccacccacctcagcctcccaaagtattgggattacaggtatgagcccccgcacccagcaaatttctttctttcttgttgttttttaagataaagtcttgctctgtcactcaggctgaagtgcagcggcttgatcatggtccactgcagcctgaaactcctgatctcaagtgatccttctgcctcagccccctaaattgctgggattacaggagtgagccattctccaactcccagccgtctagatttcttgtaatacctaatacaatgtacatgctttataaatggttgttacactatattgtttaggaactaatgacaagaaaaaagtctgtacatgttcaatacagacacaactgttcatctatttttccaagtatttttttacccatggttggttgaatccatggatgtgaaacccacacataggaagggctgagtaattaggaatcaagatcatgacaaaccccaaatgtaaataatcacagcatacgtcatgaggttttaatgattaaaaatctaagcagatgagtttatacttactstacataaaaattgctgaatgttcatttcaactattttatgtgtttaatgagtcataaaatactagagtctctactgtaggtaataaatttagagtcctgtcagcaattgctataaagaaacaggttcaagagaccagttgacctgggcttatctgcgctttccaagaaacttttgccttcagattcaatactggattcaatactttacatttttctttggtgggagggaggcaaaggagaaataatatcagagatcctggaaaattttaagatgcacatacttttgcaaagttagtattgattagaataagaatggaatttataattgcaaataggcaggtaatgaagcatattttcaaattgtttctcatttaaagtaaaaaacttgttctttcagcgccctttggctctgggagctgatatttctatgtattctgcaacaaaatacatgaatggtaagatgcatactttgaatgttctttttcatggataggtgaaaattgcatagggcttggcttttgatcccttttctttgattattttgtagattatttcctgtgactcatagagagagtaaaaaaaaaaatcctttgattaaatgtaggatttcattaacagtacacaaaactatgctcatgatttatgagaagaggattaaagttggccataaaaagttatgcttttatcttgctgacaccttaaagaaacattttgtttttatataatttttattttcttgttttagacatagcttttgctactgtccagttgaataaaggttacttaaacttattttatagagctttttccctgagagttttttcaagtgaaaatcacattttgaaaattataaaataaagagtaaacataaattgtttctaactgaaatttttgtttgtttgtttgttttttgtttttaggccacagtgatgttgtaatgggcctggtgtctgttaattgtgaaagccttcataatagacttcgtttcttgcaaaactgtaagtattaaaaagtgcaggttccctatgacactctcagtgactacatttgatatttgtatttccactaagtgatgtgaagtgatggcattctaataatttatgaagaaatgaaaaatagaggagaaaaattctgattttttttatttattaatttttttttttgagatggagtttcactctgttgcccaggcgggagtgaagtggcgtgatctcagctcactgcaacctccacctcctgggttcaagcgattctcctgcctcagcctcctgagtagctgggattacaggtgcccaccaccatgcccagctaattttttatatttttagtagagacrgggtttcaccgtgttgaccaggctsgtctcaaactcctgacctcaggtgatccacctgccttggcctcccaaagtgttgggattacaggcatgagccaccgtgcctggccaaaaaaattttttctgattttagaggaaagtgttataaaaatagttattgcaggctgggcacggtggctcatgcctgtaatcccagcacattgggaggctgaggcaggtggatcacttgagcttaggagtttgagatcggcctgagcaacatggcaaaaccctgtctttaccaaaaatacaaaccaattagccaggtgcagtggcatgtgcctgtggtcccagatactcagaggctgaggcaggaggattacctgagcctgggaggcgaaggttgcagtgagctgacatcgtgccactgcaatccagcctgggcaacagagtgagatcctgtctcaaaaaacaaaaaacaaaaacggttatagcatagcaaggctttatgatatgatataagaaatgagtttttttattttcatgtccatcttaattataatcataatttgrtaaagccctagtgaatttttagtttcaagacttaatggtttttttttcttttttaaaattacatttgaaatgagggctttcatatactataccttttatatcacgaatgatggttaattttaaatagcacttacagtataaacttacatttttcaatagatgtctaaacaccatttcctatttacattgcttagtttatctccagtatagttaaakattaagccattgtaacttgacaggtaaaatataaacatgattaggaataaaaatgtcctccacaagggaaactgaaacttattgcttgataagtgtcctttggtttataaaaagtagaaatgaagtatatatcctggaggcatgtgaaatcattgaccgctttgcacaaaggctaaatagaatattagtagaatattcagtaataataggacttgaactgctgtttttctctgtatgttaaaataatttttcaaagaaatacaaggttaggctatgaacaatttatgattttattaaaatcatagaaaggactacttatcttcatatttgagaagtttatatcattgtgcttttacttagttttcagcatatttgcttcccctcattttaaagtaaatttctctaagcatattctatgctttgttcttctgcttctgatttgatatattattttcctcctagaactcaaacattgagctttacacctagcttctgagagtcactgtaatggaaaagagaagccagataatttcttggccataccctgccttcaaacttatccaggatgtgttcattttgcagctcttggagcagttccatctcctattgattgttacctctgcaatcgaggtctgaagactctacatgtccgaatggaaaagcatttcaaaaacggaatggcagttgcccagttcctggaatctaatccttgggtagaaaaggttatttatcctggtatgttaatttgatttctaagcagatctactaggatttcagcagttatcctgagcatcgtgtttatgtaacatttatttgtaagttaggtgctttcacgtattgtttttgttcatttattattgagcactgccatgtgtcaggctctgtggtgggtcaggtggaaagaagatagacctggtctctactgttgtattgcctctagtttagtggatgcttggatagtagaaaatcagttttatgcattagttgttcctgtggtggtctgtgatttgaaggcttgtgtatacctattcaaagattttaacattagacttttcagttgatttgcttataatcttgtctgtctgctattcagcattagctgtcactttaatctgatagaggtttgtcccagttgagacttgatattaggtgctaaaattcccctgaggttctctctctctcttttttttttttttttttttgagacggagtttcactcttgcccaggctggagtgcaatgatgcaatttcagctcactgcaacctctgcctcccgggttcaagtgattctcttgcctcagcctcccgagtagctgggattacaggtgcccgccaccacgcccagctattttttgtatttttagtaaagacggggtttcaccatgttggccagtctggtctcgaactcctgacctcaggtgatctgcctgccttggcctctcaaagtgctgggattacaggcrtgagccactacgcccagccccctgaggttctctcctgtatttctctcctgtatttttattccttcacctcttccagcatctagaaagtcttctgtggagttggctgacttacatcttactttttgaatttatttttaccagtcttttaagctgtggtggtcctaagtagttcttttctttttagatccttttgagggttctagcatctagaatatatagaaaaattaagactggaatttcactaggaaattcacaaggaatttagagaaaccaaagcgaaatacatatgaaactaaatgccctaaaggtactttaggtaaagagctgttgattgatatatattttggatggagggagagagaagagttttgagctatgccatgaagaatgggcagcattggttaaaagggcatagacaaggtattggagatttattcaagaaatttttattaaacgccagctatgagccaggctttgcactaggaactgggatccaattagtaacaaaagaaatggatttgccctcatggagcaactctggtggctaagacagatactaagcaagaaattacaggatataattaacaagggaagtccaggttgaagggacagcatgtgcaaaggtcctgagatgaaagggagtgcagtggtgctggcataaagaaagctgaagagggtagaaaagatgaggcaacatgaagctggagagataggggcccaagcaagtagtcagatgtgagcatggcataatcctcrtcttaggcttatttgcagttaagtagacagtgaaaaataccaccctccccccccaaaaattacatgtttaattctaaaataagacttatgataccttatgattacagggctgccctctcatccacagcatgagttggtgaagcgtcagtgtacaggttgtacagggatggtcaccttttatattaagggcactcttcagcatgctgagattttcctcaagaacctaaaggtaaacttacaaaataggtttaaaattgtaggaggtaaggccttacagcagttcactatctctcacttctactcaagccagataatgtttttgtatctgcaggttacactcataaacctctttatcatgaaatgcattgggttgaaaacaacttaaacaacaatgtagcagacatctaaatatgttcacttacttaactctccacatactacaatcagtttggagacacagagtattctaatgcatttatttaaaagtgaaccccttttttcagatgaaataggtaaaacctcgaagtagtgtgcagttagtgcactgcacaagggctgttctaaaatccatcctgtgaatggctttccaaaccctgtgcctcctaagctgcatctgactggggtgaggcctttgtctaattttcaaaaagccaggaggaggctctcaggggccttgagcaagaggcctgtccaactccatacactgggcttaaccttgagctcatgcagtttatatactacagaatagattaacagaaagctgccagattagtcaaagtgttcctggtgtcaccttaatttaatacatttaccaaagtaacttttaaaacatttgtaaagttttatgacactatcacactcaacataaaaacagtggttttttttttttcccctattccagcagggatttaaaggatgtatttcataagtgatatatattaacaaggaagtatgtataacttgggaagcatttagagatttttttatttaagtggtaaccacagagcaaagtctcaaatgcaataatttttttttttttttttttttttttaggcagagtttcactcttttgcccagactggagttcagtggcatgatctcggctcactgcaacctccacctcctgggttgaagtgatactcctgcttcagccttccaggtagctgggattacaggtgcgtgccaccatgctcagctaatttttgtatttttagtagagayggggtttcactagttggccaggctggtctcgaactcctgacctcggtgatccgcctgacttggcctcccaaagtgctgggattacaggcatgagccactgtgcctggcctaaaaacatttatttttagattttagtatttttattttactagaaaatctaaattcatgttttctttgctatagctatttactctggccgagagcttgggaggattcgaaagccttgctgagcttccgtaagtatagttctgtttttctcagtattttaaatttgatgtcagctttaatgattgggaaagaaatatgataaggtcagggataattcaagatatttaacaataagaatagcaggacattaatcagaatggactctaaccctgtcaagatggagaccctgataaaatctcatggagggcttcttgttagtgagcggtgtcctcccaaatgttgcttccttccctgctctgtcaaaaagagattccagcagtaactgtattctaggatctctgatctctgacctctaagcaagggccacatgttctaccctactcagccttagaggggattggagactttgtactagaaaagctgttttcaaggctctttgggaaacagaaaatgtgtctctgatgaaactcctccatgcccttgattgttggagaacagccctactagatactgtcaaatcttttgttttctgttctctgtagrataaacctttaatgtcttcatgttgtgtacaagataaatccaaaccctaacttggtaccaggcccttcagtatctaacccaatcaattcatctagttttttcaaagcatcagaggatattggtacaagaagcagtctaagatcatacagtccagcagcttattttacaggcaaggaaacaaagatccagaaagttgagctgattgactcaagtgtcacacaggaacgtgttcgcagcttcactcttggatttgcatcagaaacagtgaggggaggtaaaaggtgcttggatctagatttgagatctgcttccaccaattagttaacctttaaacttccattttttaacacataaaatgagattaataattaatgattttcggcctggtgcaatggctgacgcctgcaattccagtactttgggaggccgaggtgggccacttgaggtcaggagttcaagaccagcctggccaacatggtgaaaccctgtctctcctaaaaaaaaaaaaaattatccgrgtgtggtggtgtacacctataatcccagttacttgggtggctaaggcacgagaatcgcttgaacccaagtgatggaggttgcagtgagccgaggttgcagcaagccaagatcgcaccactgcactccagcctgggtgatgcagcgagactctgtctcaaaaaagaaccaaaacaacaacaaaaaattaatgattatcatttattgattacctgtccccccaagcattcctgatatatatattacctttattatatgctactatgaccatatgttgtaattactgcagggttaagtcaacatcataacctaactatttttaactgtactaaatgtatacggtgtatttctgtgtcttcatttttataaacatttatggaataacttgttttgcaagcattgtgtggagaaatgtcaggtcccaccaaagtttaggcctattttctgtctttgtataggagtttacagttagaccaaaagtcaggcagtctcaccaagttaaaaaaaaaaaaaagatgtctaaataatgacttgaaataattcatgtaacgcagatttttgttagtctttccggaagatgcctgctagtaagtttggatgcacaagagggcacactcagcatgtgaaatgggtttgtttttcacagtaatgaaatgtgtattacgttaagactctcttgtttaaaaaattgtcttaaaataaatctctcctgatttatttagggatttttgtttaaagttgcttggcccccagacactctggtttaggctataaccccgatgccagaggatgagtggatttaggtcagggcttgtctgttctatcacccttcattctgtgtctcccaactctgctgctactagtgcagcattgcaatatgggaggaaggaagtgaagctaatgtgtattagcttagtctcccagcctcacaacacatgtaactctgtgaccttagaaaagttactcatcctccctaaatctcaatttcctcaattttaaaatgtggacaacactctacatagctcttaggtttgttgcgagaacatggggaaaaaaatccctaagctaatgccttcgttcatactaagtacccaataaacgttagcacctactatgaactattatcttttattagacatctctactacattccaagtgcttagaagtgctttatacatgttccttcaaattaatgtctgtgacaaacctttaagacaggtgttatatccaatttttattcattaaaaaaatgaattaatgcacacaaaccacctagtagagtatctgtctcatggtaagcacacagtagatgcatctattattatttcagataaggaaataggcactgaggatgagtaacttttataaggccacataggcagtatgtggaagggctaagattcatacccaagtttgttggtctctgagacctgagttcttatttctacatgtacacactcttttaaggaattacgagtctcccagggcagaacattttaagatggatgtttgtatctaaacaacactttagtaaagtgacaaaggaagatatccatcactcagaccacagctgagatttttttttccccatggctctcatgtaagagaggagaaagcagcttaggtattgattttgctggtggtgtgcagggaaaggaagagtgttggttgtaatacacatactggggttaagtaagatgctaaacctctcctccattattcttcacagaaatttctccttccctggaacttggcagtctttttgtctatacttgtttggcattgtttatatagactattttgttttgtgaattgtcatcgcttttacctcctgctttgttatttaggttaaagaaaatatctcattcttcttggtttcccaatttttactgcagtgcttgacatattatgggtggttttcctttacatctgttgatgatggtaatgggctgctagatcgtttgaaaaatccttccaggcctctatgccaggagttatattgtggaattctgaatgcttactggttgctactagtgattcttggtcatctttctccgatgtgcctcagaaggtctagctctggattgatycagaggaaactaattatgacaggctcttggtccaagagacctcttataagtagcaatccagtaggttggtcatggagtacatgatttctggccaaacttcatttaggcaggtattaaaatatacacrttggggaggctatgccttaccctactgcatgggggtacttgacacacactttcagtatttggattgagcatatcttaccaatggtataaacaggataaaaacaatcttgcttttcatttaaaatcatagctagaagagataagtttcgtaattttctctttttttgcctgtgaattataggggtatgcaaaatttgatatttggaccagaaaaatgttgagggtaattgcagtttatgagacagaaacatgcctccactgacacaatatagtgatcaaaaatttgctcatgtcttctttcagggcaatcatgactcatgcatcagttcttaagaatgacagagatgtccttggaattagtgacacactgattcgactttctgtgggcttagaggatgaggaagacctactggaagatctagatcaagctttgaaggcagcagtaagtcttattattgtgtgtgtgtgtgtgtgtgtgtgtgtgtctgctttatcttgggcatggggggtcactatatttacaaagtgtggtctcactgtgaactctaaagcttttctgttcctgtaatagaccaggtgtataaataaacgtatagggagctcagtcaaagtgcatatttaaaggatggtagtattcagaaaaaggacttcttgaggagttgaagctatggcctatatgtttaataacatatttttcttgtgcactgttattatagcaccctccaagtggaaktcacagctagtattccagagctgctattagaagctgcttcctgtgaagatcaaatcttcctgagtaattaaatggaccaacaatgagcctttgcaaaattttcaagcggaaattttaaggcacctcattatctttcataactgtaattttcttagggatcatctctgttaaaaagttttctgtatgtcatgttataattacaggtcaattctgttaatatctttttgttaattttgctctatgtttgcctctgaaggaggtgagatttgtgctactttgggagattatgttcttttttcatgtctaagatttattttgatcatgtttataatataatggtaattcatttttgatgttttgtgaagaatttaaatttaaacgaatgttcttaaatcaagtgtgatttttttgcatatcattgaaaagaacattaaaagcaatggtttacacttagttaccataagccgaaaatcaaatacttgaaaagtttactgtgaaattctactgatttaagactatacttaatatttttaaaaaaataaatcagctgggcgcggtggctcacgcatgtaatgccagcacttttggaggataaggcgggcggatcacgaggtcaggagattgagaccatcctggctagcgcagtgaaacccccatctctactaaaaatgcaaaaaaaattagacggacgtggtggcgggtgcctgtagtcccagctacttgggaggctgaggcaggagaatggcgtgaaaccaggaggaggagcttgcagtgagccgagatcgtgccactgcactccagcctgggtgacagagcgagactccgtctcaaaaaaaaaaaaaatctaattatcaaatgcatcccattgtgatattcctacattatgtgacattaacctatattcctgggtccttttaattcccaactactgctcttagaggtcttagccttttatgttaatttttataaattcaattaaataaatattattcccaaatcttagtgtttgcagattagttataaatcctatccaaggtaggttaaaggccaccgttttacagataaatagtactttttatatttttatctgaaatagtgcatttgttgagaataaaagaaggtatgtttaaaaatagaatcttttgggcctggtggtacgtccttgtagtcctagctacttgggcagctgaggtggaggatctccttgagcctaggagttccagactgcactggcgtcactgcactccagcctgggcgacagaatgagaccctgtctctaaaaaaaataataaaatagactattttatagttgaatgtatagttagcaagttatcatctgagccataagtcaaaaattaaatcttaaaaattgtttttatactaaaggtttttcatcttataatatatcttgatattgccatttgtttcggttaaaataatatcatacagcctgatgaataacagtgctgtttaggaggagaatacataaaaatatacattcttctatattatccacactcttgagttatacctattgagtctggaaattctgtctctagaggcagtagcattttgaggcaggtcctatctcactatggtttctgccagaactgatttcttgccatctcaaggccttagggctgtggaaataaatgatcaaccaaatgagaaaaggaaaggctattcttagcttactatagcaagggagttagccaccatcacctgggttttggcagaaagtcaaaggcgggcagatgggtggaaaagttttatagcagaaaaaagggaagccttcagatatgccctggttgaagactgttggcatagggaagccagaagcaggttgactggagtcagtgtttcacagtgggcaggtctgtgtaatcctacatcaaagtctaaggaagttgagaggccaaagaggcacccagtttcttagaaagaaacatttaatagggatttaggaacagaagccgtgactatatcttgggcagtgatgaggcaagttggtggatcccagcataattacccccaagacctgggacttttatgccatagggagaggagtggttgaaaaggaatttgtaagacaattatgataacatcaaagctgtttgacctaagggcaggatttactgtatgtatgagtttatcaaggtgtcttactctaagggcaggatttacaataagtacctgctcttaaacaaggttcaaatagataaattggaatgagggttaatcagaagctaacagggcagattagcatccaagatggagttgctttggcctctagatggggcatcctgtgcaatttgctaaggtgcttatttggctttctctggtcctaagttggaagcaggggcaaaattaaagaaactgtcattcattcatttcctgacgattctgggccaattgttacacaagttattgtttagcttcctggattgtcactaaagaaagcaatctggtttcctgcaattctgacttacagcaggctgatctcctgggttgtttattgttgatgagggtgttggtttctcgggcagcttgctgcaggttgtgggtcgaatttctaattttacatatggcatggccactgtccatttctatattcagtctcttagggcttctggtgagcagtaagtaactaccatcgtgttagtcaaggttctccagactaacagagccagtagggcctgtgcgtgtgtgtgtgtgtatagagaaaaatagagagatagagatttattttaagaaatggctcatgtgattgtgaggctggcaagtctaaactctattgtagtcttgagtttgaaatttgcagggcagaccattcagctgaaaatacaggcagagattctgtgatgcagttttgaggcagaatagctttctttagggaaaccttagtctttgctcttaaggccttcaactgattgcatgaaactcatccacattatagagattaatctcctttgctcgaagtctatttaaatattagtcacatctaaaacatacttttacagcaacatctagactggtgtttgaccaaacaactgggcatcatagctgacacataaaattaaccatcacaaccatgttctaggcactgttcctcactgcctgagaagacaccgttatgtttattagggtttttgagttttatccacagcttttggttatctgcaaccatgtctcccaccattaacatagttcacactgagatgaggattccctatttaacacttggtcccaacttcttcacagtccatctggttttgtagagggaacataactggacattctggtcaggttaggtgaggtcaggccttcaggacgctattttcactgagttgctttataaggcacattatgcaaaattccatcagctcttctgttcactacattcactgttgaaattctaagagtgagactgctgtctcacaccaaagccagtgggtactatcttcagtaggcacgcagcatcatgtttgtatttgatccagctagatgacatgtaagagaaaactttattgtggactctgtaaagtgtgacattcgtttgtgactcaatttgctcatgtatttgttcctgggagttcattacatagctaacttccagctgctttcaatttacatcataaaagaaatgcatcatattcttctcagtgtcctggtagtgcattttcctttagtttttcagtgaattctgttgtaagtaaaatggataagattgttcattattttggattattttgctgaagatgaccagctctgagatgtgaggagtaaataagaaagtaacagtagaatctggaatatcttttaaaaattaagacatcatttttaacagcagagtagccttaaatgacctgattccacagaggagccaggaaacagtatgaaactacaaatttattttgtagaaatatggaaaccttaatactattaagatgcaaatcttaatactattaagatgcaaatcttaatagtatttttataaagtgaaaacaatatgatcacttaattactcaagtggagctgaagaaaatttcagagaaaaaaaaataaagcttggaatgcactttagaaaaacacaaaagggaacacaaatgcttcataacaaatctcttaggaggccaatattgaaagaaataacaaaagatggtaaacatgattaaacaaaatgtcatcaaggagtaacaaaagtattactcaaaataaaacttctcttaggaattatccaaagaaaagtaattgtttaaaaaagaatttccacttctatacaacaaaagaaaccctgatttcatttatttcacaatacaatacacatttacttagaaaaaaatgagtgcaataaaaaatgaaattgcttttaaattgaagaaaggattgctatgtcttcttttaaataaacacatttgattcaattttgacttattgctcacaaaataaatttatatttattacagcgagaactgtcagatattgcaaacttctttgtcttttgaatagtgtgcctttaatagaacacatatagcatagttctagggattagagtcttctgacttcattactatttttacagtaatttatatcttggtttcttcaattagaaaaaaaaatcgggcctgattttttatttcatttactagctcagctgttctcacacctacctgctgaattagaagggacaagtataatccatcttcttacagagaaggaaaggaaggttcagaatgattatgtgaccattccacatcatttgactagcaaaaataagtggcagaggcagggctagaatgttggacttcagatctcttacttctgtgtgctagtgcaccattcttagtccagcacagacaattctcaaacagattagcaaaccaccctcttgaaattgcaagaattgttaccatgtgatcaaggcatcataattaatgcaaaccctagtttctagttgggaaagagattaagatggagactttgtagtaaaagatggacatatattttattcacatagcttattttattttgaatgaaagagccaagcaaactctagccttggcctgttcctgaggaggtgatctctgaaataaatgtgctgcagagttggggacatgggggctggccttttatagccctgtattattcaaccattagttatgagctggagatggggagggacagggaagttgaagggggaggcatgggaaaccttcctggtgaagtggctctagtcagcagatggcagttctctggtggagggtagactggtgctggggcctggtaaagggaaccttaatggtgtgttatagcatccagtataggtagtaatttatgtctcacccattttatctaacaacctctataaactagcctaaaaaaagtaactgtggctataatgttgtggttattggtgtataatgaaattgttcaccccttctttccttcttttcttctttccctccttctgtaataatgtttttctattttgcagaggtaatttttttttttttttgagataccgtcttgctttgtcacccaggctggagcacagtggtgcaatcatggtttgctgcagcctcaacctcctgggttccagcaatccttctgcctcagcctcctgagtagcttactacaggcatgtgccaccatgcctggctaattttttgtagagatgaagtcctactatgttgtccaaactaaaagtaatttttttttctagagagtttagagatttaggaggaaaaggtggtctttaataggctttctttttttcctggggtggggtgcagattcttcctctgttacccaggttggagtacagtggcacgatctccagtcactgcaacctctgcctcccaggttcaagctattctcctgcctcagcctcacgagtagctaggattacaggtgtctgccaccacgcccggctaacttttatatttttagtagagatggggttttgccatgttggccaggctggtctcgaactcctgacctcaggtgatccacacgcctcgacctcccaaagtgctgggattacaggcacgagccacagcacctggcctttaataggctttcataacagaaaagtagacatcagactttctaagttcaaaacctggctctggtgcttaccagctagctgaccttaaacttaaactatctaaactttaatgttcttcctcataggaaaaatggggctaataatgtttcctgacataatgcatttaaagcatggatgcattaggtgctcaataattgttatctatccctttggcttagtaaaaaccattgtcaaagtttttgtgtatatgacttttaagttttctctaaattatatagacagtattttgaatattggaatcatggcaaataaaactgtccatctaaatcttgtcgtggtttagatttagaatattctgttgttgttactaagtaacagactggttatcctgggttggagggtggttctcatttta

SEQ ID NO: 94976 - DNA, 33169 bp, Homo sapiens
gacaggtattgaacagtttagccaaatatcaatgtgctaagcatgacaattctatttctctacaataagcaagaagagcaagacagacatgctaacgagtgaaataatataatgtggtctagacatatatgagtttcagaaaaagaacaaaggataccatcctgtctgaggcattccaggaaggttgtactctatcagggttatgacagacactgggaatttgacagacgggcaagagaaggaagggaggcccaagcaaagggctcaacaaagtgaagggaggcctgaaacaatatgcaatccatgagagacagtggccagcttggtactgccagagcacaaaggaaaggggaaaatggcagatgatggcactaagaagccagcaggggacaagatgggaaggatcttatagctgtgctaaagtgattggactttattgagtaagttctgtagacctcttaaaaacctcaaggaaggaagatggtcagattttcctttaaaagaatgcctctggcagtatggttgggaatgagttgaagagagatttcaacccttcccagctaactttccagcaagtcagctgggaagcctccaggatcatctgtctataaggagtactaaagtatcattgagcatgtaatgaaaatgagaaaattatatttgctagaacttctatatgtggatggaagaaatacttataaaatgtaggctcagactactttgggtcaaatcctacctctactgagaaaattccttcagggtaggtagcatgagggctgctattggggaaggagcaagagggacaagtaagtgtcttggagaagatgaatgtcttacaggcttctcacatctcacgtttaactgagaattcgtaatatacccatttccactcagcaatttctcccctagtcctggagactagtttgacagtcattcaattgctctttctaaaacctagaaatcgaatttgggtctcccatgtgctgaaaaaatgctttcaattctacatccttccctgttttcatgacctctgcagtgtgacactgtagtccttctcactgaagactaccaaggtcaaagctattttcaccccactcaaagtctaagctggccacatgacttgttttggctagtagaaagtggtgaaagtgacagtagatcagttctgagcctaggccttaagcggcttctcctgttatcacttgctctttcatttgtcattgccaggggaataagccctggctggcctgctggagaggagaggtatagcagagccaaataacctcacttatttcagccagtatctagacagcaaggtaaactccagttatgaaagcaaatcaagacatattgcagatacacctagccaaccacccgagaaacttactcttgtgtgacactgaggtttgctgtttggcttttatgctacaatgttagcaatagataggtgatgatctttaactcattttcttatatcccatatatatcaacctatcatgtgtcctataatttctacctacaaaacatatctcaaatctttcaatcttttttccatatgcattgctctactgtaatctaagcaccatcatcacctcacctgaaatgaactgccagtttccctacttcctttctagacacttataatccattcttcaaataccagtgggagtgatttttttccaaaacataaatcagatccctcagtcattcccctgtttaaagccctgaatatcttcccattgctctcagaactcaatccaaactcctcaccatgacctgcaggccccagctgatctgcctaatatcaggatgaaaaagcagcttttataataccctctaaaccagtttcttcaaagaaatgtggaatcagtttctatttagaaatctctgtagaaaggtgttttgctattttaattcatggaatattattttggtaaatacaccaaagtatgtcaaaataacagtttcttaggcagacacagaaattggacataaagatctgattttaccaaaagacaaaaaattaaggtggggaaggaataaaaggagatgatgaaaagagaagtaacaatacattggggatccggtgtatcacactgaaaccacagaaagataaagttagacctagaaaagaggtctacatttgaggatataggagcaaagaggtcaaaatcatgctttgaaaggatgtggacatctgatctttaacttcacaccaatggcagaataagaaaaaaatgggttacttctgaggtaggaagtagtagctagaagattagacactctcaaacttcctgagaattgacattaataagcattacttaatattcatatggaatacttctggctaaagaatgcttttgcatattttccctgtcttatacctgaggagctcagggttcaatgaaatttaatacacagaaattagttttcatcctgaatttctccaagcgtactaatttgatgattcatatggcctacgggtttgtgagcattcctagaatgaattgccatgatttgtacttttaaaagaaatatccttcaagaagctgacttctaggatctatacgttgaagcataaaggataccacagacgcaaaacaatgcaaaaagtgctaaaaccagttgctgttcttaaacaatgtggttatagccccagaacaccaaaggcagcacagggatatctaagaaaggcacttggtgcagacacgggcaccagcaagaccggattctcatctcccaggaggtgaacttaaatgcagtttgttaatgctctctctctcaactagtatacgctttctttccgacaaagacttctctttcagcctcttgtaatgggaggggagaggtgaaaattttaaaaagctgctgggtcttgatattagtggaatttctctccaatgaactgacagtgtacaggtatgacaacatggcctgtagctcttctcgaagagaagagactgctgagaaaataaaatccaacaaaaatgctgcaggagaaagtctttctaacatgctcattcctctgccttctctcactctgcatctttccctaagaatgccacctccatcttttttctatgtcaacactgagcttatccttcagatgctaactcattcagcctccctattaggctctcaaatgattacaggccccggggatcttctcctttaataaataagttcaaatcacaatcagaattcattttctctgtatccctgaaacatcacacacacacacacacacacacacacacacacggtgtgcattatctgaatgaattgtaccagaaaccagaaacccaccggtaatccttttttatgccttttatttccccaacacatttaccagtcccagagttagattaggcctcctctgaagtatctcttgaatttcactattcgtatccatccctcagtgtacctgcttacaacagctatctccacttgtttgatctgtgcctccctttaatttgtcttgcccaaatctcctattccagtatattatccacaatgcattctaagtcgtcctactaaaatgcaaatcagatcatgtcactcctctggataaaatatttcagtgattccccttttctcatgacaagggtctggatttctgtaaatggtttatgatgttctttttttttttttttttttttttgagatggagtctcgctctgtcacccaggctaaagtgcagtggcacgatctcagctcactgcaagttccgcctcctgggttcacgccattctcctgcctcagcctcccgagtagctagggctacgggtgcccaccaccacacccggataattttttgtatttttagtagagacggggtttcaccgtgttagccaggatggtttcgatctcctgacctcgtgatctgcccacctcggcctcccaaagggccgggattacaggcgtgagccactgtgcctggcctagtttatgatgttctacacaatctggcctatgattatctctagtccagtttcatctctagctattttcccaccttatgttagcctctagacttttataaataacacaagctgtgcctgaacactcttctacctgccctttgactggctaacttttatatatttatcccatctcagcttagatacttcctttttctcctggaggttcctaatgccagtatcaatgttcttcctgggtggtaccacagcatcctacggtgacgaggaggaggtggcctagatccttccttttcttggtaaagggtggaagcagtgtggatactttacttggtgtgttctgatatccatgtgtcactaggcacttgttctttgtgtcttcacatctcctcctgttgcattttaaagcactttcatagtatatggttttgcctaataaagcattctcatagcaaaaaaaaaagtatggtattgtgcaaataagtgctcactccaaattagtggtatatttattgaagtttaatattgtgtttgtgatacagaagtatttgctttaattctaaataaaaattttatgcttttattgctggtttaagaagatttggattatccttgtactttgaggagaagtttcttatttgaaatattttggaaacaggtcttttaatgtggaaagatagatattaatctcctcttctattactctccaagatccaacaaaagtgattataccccccaaaatatgatggtagtatcttatactaccatcattttataggcatagggctcttagctgcaaataatggaactaactctaataaagcagaacgcaaatattgtaaatattagagagctaacaatctctgggatggctaaaggatggagcttggaggctacccagccagtaacaatattccgggctccactgttgaatggagacactacaactgccttggatgggcagagatattatggatgctaagccccaggtgctaccattaggacttctaccactgtccctaacgggtggagcccatcacatgcctatgccctcactgtaaggaaatgaagctactgttgtatatcttgggaagcacttggattaattgttatacagttttgttgaagaagacccctagggtaagtagccataactgcacactaaatttaaaattgttaatgagtttctcaaaaaaaatgttaaggttgttagctggtatagtatatatcttgcctgttttccaaggacttctttgggcagtaccttgtctgtgctggcaagcaactgagacttaatgaaagagtattggagatatgaatgaattgatgctgtatactctcagagtgccaaacatataccaatggacaagaaggtgaggcagagagcagacaggcattagtgacaagcaaagatatgcagaatttcattctcagcaaatcaaaagtcctcaacctggttggaagaatattggcactgaatggtatcaataaggttgctagagagggttagaggtgcacaatgtgcttccataacattttatacttctccaatcttagcactaatcaaacatggttgaatastttgtttactataactcttacagagttataagatctgtgaagacagggacagggacaatacccatctctgtctggttcataggtggtatgtaatagatatttttaaaaataagtgagttaatgaatgagggtgagaatgaaggcacagaggtattagggggaggygggccccagagaatggtgccaaggtccagtggggtgactgggatcagctcaggcctgacgctggccactcccacctagctcctttctttctaatctgttctcattctccttgggaaggattgaggtctctggaaaacagccaaacaactgttatgggaacagcaagcccaaataaagccaagcatcagggggatctgagagctgaaagcaacttctgttccccctccctcagctgaaggggtggggaagggctcccaaagccataactccttttaagggatttagaaggcataaaaaggcccctggctgagaacttccttcttcattctgcagttggtgccagaactctggatcctgaactggaagaaaatgtctatccagtaagtatctctgggagacttttttaaaacaccttcatggattcatgataaatgtgctatttcaagggctcctgaagagaaggcattgattaatgaccwgtttaggaaagacccttgaattttggtggggaaattttttcctgcttatgtattaaagcaactagctagaattcaggtccaaattatggggggtttgtgtgacttagcccggggtttggaagcagtcttgagtatggggatttcagacagacttgggctccactccttgcccagtcatttcctagtgtgtgactttggacaaattacctaactttttaagtctagcttttcctgtatatagaaagatgtcacaatagcttttactccattatgttactgtgagatttaaaagagataataccatgcaaagttctttttatggtatgtaggacatagtaattgtttagtaaaagrtaattattataattgagtctggtcagagattccactctttgaagttacaacatgaaactkaacagaggatgtagaaagtaaacaaaaatatagaacctgaatctcctggtctgactatgatgaaaaagtactgtaggtcttggggattggtagagaaatgagatgatggggaaaaaattayggtataatatgagtgaataatgaaagatgaggtacctgacccaaaaagctgtcatctctcaacccctaggaaggagataaatgggtctctccttgaggcaagaaaatcaatgatgctgtgagctgagcatgttgatagggtgggagaatactgtgggaaggaccctgtttaggaacaaatttcaggaagtgaactgatggcagtaggattgattgatttgtcttccgaagtaaggaaaaactgcagaggacaggattaagttcactgtaaccaytgacattaaaagagaggtcatgtctcttgacatcagagcagtgatctgggacccccttccatacctgagtagtcttccccacccccagcctcacgtgctcctcccgccctcaccttcgcttctccccccacccccacccccacccagctgagactagaccggcaggagtgaacaggctttgagccagccctagagtgccttctctyctgcagctctgcctctatctctgcggactttgagcatcaacatgggcttcttccttattcttccaccatttcagggttgagcatcctgctggtggttacaagaaactgtttgaaactgtggaggaactgtcctcgccgctcacagctcatgtaacaggttggtctcgcccatcttgaagccatcctcttttatgtcagtctctcttctctggcttcctattccttggcgtctctcagtgcagactccccctgtgggtcacagggagagggatcaggtggtttgggctttttatagcaagaacccattttctttcattcgcctttactttatttctctaatgcagaaaaacgctacctaattggaattccctaaggatcaggattacacctttgtcatcttcaaactgtcagtgcctagctcagtgcctggcacatagtaaatgtcctataaatgtctrttccattggtgtctgaataaatgaaggcccagtgacaagcacctgggagtattaaagggtggtgggtttcatgcccattttattagaggaatgttggttctgctgggaggcagatgtagatgctaacctagctctatcatttcactgtctgtgaatcctctaagttacttaaacgttctgagcctcaattcccttacctacaaaaacccaaaatttacgtcatgaggatgttgtgaaaattaagtggagtaatgtaaatagaatgattcacccactatccaacacaaagtgatcaatagacagtaattattactatcagtatcattattagttataggaaataatccatttgcttgaaaaacttcactggtaggaatcaaggaagcactgtcaatcactgcccttctcaaaggataaacctacctgggkttttttttgtttgtttttttgtttgtttgtttgttttgttttttgagacagagtctcgctcagtcgcccaggctggagtgcagtgggatgatctcagctcactgcaagctccgcctcmtgggtttatgccattctcctgcctcagcctttccaagtagctgggactacaggcgcccgccatcacgcccggctaatttttcgtatttttagtagagacggggtttcgccgtggtctcgatctcctgacctcgtgatccgcccgcctaggcctcccaaagtgctgggattacaagcgcgagccaccgcgcccggccctacctgggtttttagggacaaacctaactgtgaaagctgagaggccttaaggactatcttgggtaccccacattttgcagatgagaacactgaggtccagagatgacatgtgagctgatcctaaaccagaagtcatgtccctgacatccaaccctgtggactttctrmtacagcagattgactttcatccaagcagtagctcacactcacagagggatatagctctagattttaaagagccaggattcctgttttttcatttaaatagtcttttttctatagacacatctttttaaaatacatttattctcactcttaatccatmcttctactcctcactccactaaaatatatcaagaaatttgaaaatcttcttaaaaatgagatggcaaaaggcaaatggattggtgtttggggaaatctattaggtggagagtcccaatcctctcaagatgcttctccctcactccttccaaccctttatccacactctggggcatctccacrtttcccaaggtgtgatctcctagtgaaggtgagtcaagtcagcagacattttctaagtgctgtccagcgcgagggctggaaatraaaatcactgccagctctatgaggaagaagctgcccaatcaggctgctgatatactctgccttaccaaggacaagcctagcccaaggcagggataagaagcaatgttctrtctccccttcatcacaggcaggatccccctctggctcaccggcagtctccttcgatgtgggccaggactctttgaagttggatctgagccattttaccacctgtttgatgggyaagccctcctgyacaagtttgactttaaagaaggacatgtcacataccacagaaggtaaagcagcactccatgccactcctcctcctcaaagtagggcctagcttggctcctcctcccatgtgagttttcacctctgaactcaggaggcaacctatatacccactttcttctcacaatgtacctgggccagtgtgtctgcatggatacgagggaacattatcatggaataaaggagaagctaaagcctagggctttggggtccaacatgagtggctttaaaccctgtattcaacagacatgacttgcctaggagggtaaccttggcaagatgttgacckccaattcttggttttataattagtaaaatgggagaaataatagaatctaccttatatattcattacaagcattaaatgagagcgcagtgtctagcacacacaaagcacttcataataatagctattgtgatgcttgttattattattaaaccattggccatcttgattcctttttctttttataaaattggaaaggccactgggaaaggggtcgggggctgccacaaagtagtgaaggatgaaacatgtcatagtgctaccagaaagagaagttttctgaaaacaagagattattgctaaaaagccttgaagccctaaatcatcattccaggaaacccccattaatgaagtattaacaaatactttgtcttctgctttcgtgttcaagcctattagtggctttgttgatcaccacagatttcaggcattttgaaaagacctgtaaagaaaaagtgaaaggggacttgaagcaggacaacttgcatgataatagaagagaaacggatgatgtcaagcagaaatgtagccataagagcttactgtggagttcagataaagcttcctataccttcgacagagcagggtactctttcttcttcataaaagtgcgaccgggtgtgggtggctcacatctgtaatcccagcactttgggaggccaaggcggccagatcacttgaggtcaggagtttgagaccagcctggctagcatggtgaaaccccgtctctactaaaaatacagaaaaattagccgggcgtggtggtacacgcctgtagtcccagctacctgggaggctgaggcaagagtatagcttgaacccaggaggcggaggttgcagtgagccaagattgcgccactgcactccagcctgggcaacagagcaagactccatctcaaattaattaattaattaattaattaaaagtacaaaatcagattttaactggctctccatatcagaaatcctgggcaaagtatgctgtctactctaagatayggtttagcagacctgtctaggcaagasatggaattcaagaatacttaatttttaaaacaaaataaatgttaaaattgaagaaaaacataaaagtaacagagggagattgagaakaatataattcagcacaccatgtccggaattttcccagtaagtttaggttgataggttataggtgatgggggtgggggtcctatgtgaacttcccccagggctgcatggtgtgatatagaaagttcatgttgtcctgctctggccaactaggattctaacccagcttggccacatatgccaatcacttaactcctctgaacctcaatttcctcatctgtgaggtttaaaagataaaaacgtaaactcaagggacattgtgtctgccctgcttggtcaccccaagaaagtgagctaataaaaccctttattcttcatgttgtgcatttatgattgtgacttgatgaggacacatagaatggccattctaagctccacatgggctgtacrgattgctcctgtctatactcttccctatgtttcaatgtccttcaggttcatccgcactgatgcttacgtacgggcaatgactgagaaaaggatcgtcataacadaatttggcacctgtgctttcccagatccctgcaagaatatattttccaggttactgaacccaaactgaatgttactcaagacattttatattagccctttttctctcatggcttgaaaattactggactgaaaaattcatttgtttctacaggtttttttcttactttygaggagtagaggttactgacaatrcccttgttaatgtctacccagtgggggaagattackacgcttgcacagagaccaactttattacaaagattaatccagagaccttggagacaattaagcaggtgggacacagtgctaggtgatgttcaggaatttagaatttggaacttaaaattaattcaacataaattattcatgctgcgaatgtatgattctaacttgatgaggacacacagaatgaccattccaagctccaaatggactgcactgattgcctctgtctatgatgctttcctgcaattggtgtaatttggtgaaaagaacatgagagccacattaagtttcaaatcctagcattgtcaacaatgactagctatttgacataggacaaacattgtttcttcatctctaaaattttaaacacttacatggattggagagaacccatataaaatgcctaacatattcattcattcattcatgacacaaatacttatcaagtgctttccatattcagaatttatgctagatgcaagggatagatcaatgagtagggtaacatggtccctgcctttcatagcttttataagctagcatgaacctggtaaatactgggtgctcaaaaaattatagctactgatactgaaaatcatgctatttatggttctaggcaagtatgttgcactaatttgccccttcttatagatacttcttattagaaataaagctatatcttgaatgaaatagcatagaacaaaatttcagcaatatttggaagtgacaaattttatggagaacttagggaatctcaatgcagcagtccttagatacacattttgaaccaatatttactaagatacacctatttacaaggcattgttcttgtcttcaggtgacttaatgtctaggtggagaaatcaaatatgtaactgtaataggacaaagaatatgacgagtcttttaagaaggaaaatcttttaagaaagcataaatacgaaaggaattacttctggaagtagttggcaatgcaaggtgggacaggtgaaagaaggcttaaagggaaaggctttgggctggaagttaaaagagagggatgatttcagtgaatttagagaaaggatatgctagatggagggggtaaagcgatcaaaagcatggaggtagaaggtgttcatgaaaactggagaataatctccttggactagacytgcagcatttctcagtggaggtattagtatgacattaggcagggggtgactcatcatcatggagacgtcccacacatgggagaggtttggcatccctggcctcatccactaaacaccagtcatgttttcaatcattatacaaacccaaaacgctcctgacatttccgtatcttcccctagggggcaataacactcccagttgagaactagttgcctagagtagttaatgtcaaggggaatattgagacacagggtaggatgaaattaaaagcttgaataattggctatacatttggaatatgttgtttagctaatgggaagctactgaaagtttttgctcaaagaagtagtatgagtagggctatattttcagatgtttatttggggagccatgtgtgggctgtacgggaaggcaaaagagatacagtatagctgggagaccaagaggtgaaactaaaagccagaaccacaaatgcagtactggtaaaaataagaagaaaaaaaatagtctcaacattgagtctcaatagcacaagctgatctataattctcaacagactatttactatgtcttaacatacactccccatagctctttcttgtttatgttgtgtgtgtgtaaccatrtacaagtgtgtgtgtagytcctttagagaagaacaaaagctgagtttctaaatcattcatttgactttgatagggaatctgtattacaattacatgatattttaattagaaatatagaagctatggtatggctgcagaatagactttattaggagtcaggttccactgttactagcactgtaaaatgtaattttaaaaatgtgaaatttttgattgtttactgttattaaccagtgcctttgcctccagcctgattcccttaaatacaatttatttaaggcagcagtagcaattttttaaaatataaatatgaaagtattactccacctagggaatccataacttcccaaataaagtccaagcgaaggtctttgtggctggcccactcttatttcgcctcctctacgcatgcccttcatggcagccaggttaaatgactagtaatggccaaacagcacacattatttcacaagtctatgcatttacattaggattcccactccctggaatacactgtcatcctgctccacttggctaactccacgcacctttcaaacattagttggagtcatgtttctcaggaaaactgcctcatccctcagtctgggctagatggcgcttctctacgatgccattgcacactcacagtgctttacaccggcttattggtctaatgcagggctgtccaatagaactttctgcaataatggaaatgctctataactgtgctatcctggtgttattaagcacttgaaatgtggctaatgtgactgaggagctgaatttgaagttctatctaaaaattagtggtcctgtattaatagaacagcacgggtctagaatgaagttcttgaaagcaaagatcttctctctcctgagccctgatacagtgcctggcacatagtgaaagctcagagtatttgataaatgattgactgaataaatgaatatcttgcctattatttaaataaggktgctaaaatgtcctatgctttaaaaaaatctccctaattaattggaaataattttggttagataaatatatattccagtaattattcattcaataactctttaccaagtaggtcccaggtggaaatctagtgctgatttatctagctctttatccttaaacaagacacttgatctctctggaaccccaatttatccttctgcaaacagagatttgtgttacatttgtagttctaaacttcttatgagacataaaattgaattaaatgctgtatgcttttgccagaaatgtttatatttaattaaaagagatccatggttctcctaaagtctatttaaattaagactttctatactagatgaagcttgaagtccctttcagttccaaactcatacagtaccatgtgcaagacatatagttggtatttacatagtaccatacgaaattgacatttttggaaatcagcaattattaaatgttagcaatcttatacaattaaatctaatacaataataagagtataaagaagtctgaggactcaaacttatggtttcaggtcaatctgcatatgctaaaagaaaagtaactaaccagagcactgtatggtatacatcaaataaagagatgtcacaggtaactccagattcagacacatgagggggcattatgttctgcatgaaggtgggaactcaaggtgaaagagggtagaatccagagagatgggaagaaagagaagtgcacttaggatgagagttcaaggggtagtgatgacctcagacctagggacaaaggtataatgtatcttccttctctcaactggaggacattcactttacttccgtaggttgatctttgcaactatgtctctgtcaatggggccactgctcaccccyacattgaaaatgatggaaccgtttacaatattggtaattgctttggaaaaaatttttcaattgcctacaacattgtaaagatcccaccactgcaagcaggtgagtttaccaatctgtcctyttctgaaaataagtgtctatattgtgagaaagttactgtattgtgagaaagataagaatgtcagaatagcattttgtgcatagttaaattactctcagacttcagaagtactgccctcatccctaccctataaggggcctaatgcccaagggcatcatatcaaaggatgacgacttgaaaatatagaaagcaagtgtccaagttctcttctagaatattaaaaatgtagtacatatatatatatggatttgatcatatacaattaggattcaaacttagcaaacatttattgagcacttattcatgtgctaggcaaaattaaattaaataagcatgtatgtgtgcataatagcatacatacatatatgagagtgtactaaatatgttgcgcttaattcccaaaactacaaacaaatctgttatytcatagaagtactatagaaaaagaactacagcaaaaagagtgtaccctagaattctccattcattcttcatttattgccaggttcattgttcaccaccttgatgatggaattatttgaatgtatacagatttttgtttagtattatttagtacagttctcaaagtgtagtccttggaccaagaccatcacctaggaaactgttagaaatacaaatcttgagccttgtcctgggcagactgaatgagaaattttgggagtggagcctgcaatcagtattttaagaaactctttatgtgattctgatrcacactaaagtttgaggaccattcacttactagtgagtaaattttaatgtgcataagaattactgtacagggctattgacacaaacccatctaaactatatcctttgggcatcttaagatgttgcaaaaggcattttgaccattctgaggtttcttccctactcccctgacttaaaacccacctccagctattgcaagatgtgactccactacactccacttgccacaaccctatttgagtgcacgtttccaaatctgctgctatttggattttcctgggtgattttgcagcttcacatgaaatttcactaagaagtgcaaatgatggagaaaatgaaaataacccctctaaaacaatcaaaatgtgtttctttgcctgtataagctgttctaaatgctttgtattaaaaaaaaaataagaggctsttccaaagccttttaaaaccactttatttcagacaaggaagatccaataagcaagtcagagatcgttgtacaattcccctgcagtgaccgattcaagccatcttacgttcataggtaacttgaaggcctgctatgaatcttcaggaaaactcaagtttaaagatttgctttgcctacctttgataccaatcctgatcacaatatttttttgcagaaaactaaatttaaacataattaatttcatgtaggcactgttgattcttgtaactgagcataccacatatatacaaatttgtctgtggcttgagaatcagccctttcattcacaagcccatttgtgtttctgaacagttttggtctgactcccaactatatcgtttttgtggagacaccagtcaaaattaacctgttcaagttcctttcttcatggagtctttggggagccaactacatggattgttttgagtccaatgaaaccatgggggtaagtcttagatatatttgtcaagtttgtgattctgaagaagatgtgtttaataatgtacacttttttcctttttaaatgcatcaaaatattttcctcatttttcaagktttggcttcatattgctgacaaaaaaaggaaaaagtacctcaataataaatacagaacttctcctttcaacctcttccatcacatcaacacctatgaagacaatgggtttctgattgtggatctctgctrctggaaagggtaagaaaggacactggacaaatgggacacctcccattgttcctggaaattacggggtttttacagagctgctgcactcaatctgaatcacatctaaaacagcaagagttatgtgagagtcaaaaatgtaattggaaaagcagtaggaagtttaggtaatctgaacatcaaaactatgattaatgattgaaaactaatcgggtccaygaaccccacctgaaaacaaaagattctgtgacctgagaggtgaacttaaagttgacaaaatcmctggggaaacttgagccccatcttctctgcgaagggagaaaaagacatgcgtttttcagactagccaaatcactaagaagacaacagcrcctaaggacacaaacagaatggtgacaggaagacagaacagaaagtatctcaaggctgctgttacttaaacaaatccattaagcaggttgctttattttcatcctgtgtgggcgggaggaaatggctctgatacacctggctcaatagcagtttctgggttgtggaataaagaacaggcaggcacttgtgcttaaaaaggcaagaatcatctctctaaaattatttgtcattgcctgtgctcatgtttgactttttatttttgcagatttgagtttgtttataattacttatatttagccaatttacgtgagaactgggaagargtgaaaaaaaatgccagaaaggctccccaamctgaagttaggagatatgtacttcctttgaatattgacaaggtaacctgcttctctgtagatttcagatttaaccagaatgtttcatctctctcaggaattgtcctcctgcctcatgtttatacataaagtcttgaaatttgagagctagaaggagctttaaaaataggctaattaaacttccttcattttacaaatgaaactaaagctcagaagagtactgtgacttagcaaaagcaactgcagcagagccaggataagaaccaggtttttaaattctaaatctgccgttcttgtatttacaaaattgtctttaaaatatacttcctcggtgaatagtgcagatccactgattcctatgatactttatcaataatataaatagtttaaataatttgaagttctggagagatgaagcatcaaaaagtactcttgtagggaaaccagttcattattttggttttctataaatcttctgaaaaatatcactagaggttaaaaatcattactaacaatagacagtcatctctttatttctactttttcttccctgtatttagagactgtctttttagaataaccagagtaacatctagaatttgtagtgtgatggaaataccagtcaaaatcaataaaatataattctcacatataggtatgtgaatatatgctttcttttatatctatttgctccctggttgcacaaaaggggttattaaaacagctacatggaatgtaaaactttgyaccaaaggcttagatatggtgtagtagaaaataaactcaatttagaaccaaacaccactgctcttaagcaagtttgtaagctctatgaagaatgagaaagagggagaaggttgaggttgagtgttacagacaggcaaaggggcgtctataaaggcaaggaggagttaaaaatgcaagatttcatctataaatatgaagtagttgctgagtttggtttatttaggggtgtaggggagatgggttttgggcagagagactggaaagataggttggagcaatattgtaatgggctatataagcctttgagtgttatataaatatagggagccatttaagtattttaaatgtgtattttaagtgtattttaggacatgattagatctgtgattcagaaagttactctggcagcatcatggaagacagactggaaagtggagagtctagagcagaggctagaagccctattacaggattaatgcaatgaggcaaataaaagggaataagtagttgagttaagaaaatggtgactgagagatgaagatgcaaagctgagaaatatttaggcagcaaaatcaacagcagttggtatctaattacatgtgaggggtaagggagaggaaggagttcaggatgacttcaagatttccatcctgagcagttgagtgaatgatggtataattcactgaactgaaaacatagaagtaagaggagctgggccaggcgcagtggctcacacctgtaatcccagcagtttgggaggccgargygggtgcatcaccygargttgggagttcaagaccagccttaccaacatggagaaacctcatctttactaaaaacacaaaattagctgggcatggtggtgcatgcctgtaatcccagctactcaggaggctgaagcaagagaatcgcttgaacccaggaggcggaggttgcagtgagccgagatcatgccattgcactccagcctgggcaacaagagtgaaattccatcataaataaataaataaataaataaataaataaatagaagtaacaggagctagcttgtagaaaaaagaataaattttactttatagatgtaatttgaaagtacccactagcaatcttagcaaagcattccataggcagctgctgtacatggatctggagctccaaagaaagatcatggagagagatcaatctgggtaccttaaggatttttgctttccccttaagaagcatatcactgacatgtagttgagcrttcccaaaatactcaccaaatggatgagtcagttaatttcagtaaactcttacttygctaataatggtaaaaatyacaatcatctttaaggaaataaaagaggatcacttaacttaaatattcacattgcaaaataaagaaaaaagaaggatttttctaactgtatggttatcackgcctgaagaaatattacccaattatagaatagggaactgtaataatcataaaaaatgtctaacrtcatcaaatccgtctcctctttcttctaatagttattgagtagccactaaaacaggcatcatactatttgttgcagtgggtacataaaatacacttctagttctcatggagcccgttacctagtgtatcagagagaaagaagccgaatcaggaatagccatgcatgtcagcacaggagtagtactctcaggagggataaattgatttgttaatagctagtcagatgataatgtaggggmgattaatggaacatagttatttgcaatgggcagtaatatggcaggtggagatgggattgaggcagaacaactgaagacagaaagaacagtttgaggaaagacagataggtggagagggagatacgcagagagaattggctattatamttggttgaaacataggcaaaagtagtaaagtaaatgggataaaaagttataaaagtacrttgtactcttagaaggctttaaggccaggctaagaaatttgcactttattgaactggtaatggaaagacagtgaaggtttttacacaaaagaaaagcccataattaatggtattgaaatgataatgaaatatgtaagaatagagagataagactgcaggcagggggggaaatcatattttagattaggttttccaaaagaaacatttaaaatttgcttatttaaaaaataaagaatttgagagccagagaatacagagagagaagacagccaagcacagtagctccagaaaataaacatgtgtagaaaatggtagaaacaagagaagccagaaaaagaaacaagagccaccagaaagccctagttcctactaagagagagtaacgtcacaaagatgagtgcaggtgagggttatacggtgcccattgccatagacaagttgaaaagggtgaagactaagaataaagcactaggtttggtgatctctaagggaatagagtgagagagacagaagtcaggcttcagggctcttaaggtaagcagttgagtatctggaaagcagttactgcgtgcacactcttaaaagtttggcaatgaagagaaaaatagaaagggcttaggtcccagttacttggaagactgagrcaggaggattgcttgagtccaggagttcaaagttacagtgagctacatgccattgcagtccagcctgaggaaaagaacaagaccccatctcaacaaacaaacaaacaaaacagaacaagactccatctcaagaaacaaacaaacaaamaaacaaacaggaaatctaatttaacaatgaaaataagcaaaatagaacaaagtaaaaaaattcaacttgaaaccacataaataatatattaaacatagacatagacatttgtacttattgtatgcatgtacataaatatgcatacatgtgcacacccctcgcttcttcccagcatcaccactaagtacctcgagtcccttatttcacaaaatcttgcagaatcttctcctctattggctcccacctcccatcctttccctattctgaaaatcttccactatttacttttaattcttagtccaccaccagaaaaaatctcctgtcttctcttcttagaatgttgccttcaacctccttttttaaccaaaatctggctctctcccctaaggacactggtctccccaacagtaatttccaggggaatcagtttctcctctgtacagggtacagcccttttaccacttggcctggagttggggtagaggtccttcttctttgctgctttcagatcattgttccctctattcacccttaaaattccctaagttttcatctcattttatctaatcatatagccaagtgatgtatatgtgtgtgtgtgtgtgtgtgtgtgtatatatatatatatatatatatatccctcatgccctcgactttgccactacttaagactatactccttccataatctgtttcatgcatgacccactctgaccttttatctttcaacatcacttgccctactgcaatttccaccaggaacttccaatccattgaacacagtactttctcactctctctcactacgttgaggatttaccttctctcctcactcaatttaagctttacagtcaataattacaaacactttctcatgtagaccttcctttcccttgcctctttcttaccttatcaaagtcatttgtcaaaatcacaaccctagttaaattcagctctccaccccctccatgcttatacctctgaggctgaactaagtgcagacaacacacaatcatgttaattggtyccattttagatgcatgaccacaaatctttctgctacatttcccggcttcacttactctctcactttgctagttaaatattccacaccctcctctctttaaacttttaccacctcccacttcccgcctccacactcagatgcagctgatggctatgttttctttttctctgaaacaaatgaaagaaatcagaaaggaaccatagacttgccagcacatctacccacccaccagcatctgtactcatatactgaattatccatcttcctatccagagctgatctctttcatcctccttcacattctcagggaaatcactctcccaattctycccatctttcctagatcaccactctcctacccttttcgatggatcatttttgtcaggctcttacaaaatccttctcttgacatttttgccccaaccagctaccttctcattcctcgtcttgttggagggccttggttcccctatcttccatttatacactcactcgttgttaaatattcatgccttattcatttacatttttagctttctcttaaactcaaggttcttacctgctagcgccagctccacatctgcatttggatgcccaatagacatctcaagtctaataagacaagacttgaacttctcatcttcccccaccaaaaatttactccacctgtagttcctatctttgttgtgacatcaacattgtacaggtcaaacaccttggtgttatgcttgatgcctctcttactttcatgcctcttcctcgtcccatatcctatttaacaggaaatcttcttgactctgtcctccacttcttccacttctcactgactgcaatgctactggcctagtgtgaaccattgttttctttcaactagactactacaagacaaactggtttccctgattccactcttggatcctccctactaacaaggctaccctaaaaataaatcatagcatctcactcctgtgctgaaaaccctccaatggcttcccatcactcactcacagagaaagatcaagtcctcataatgacctacgaggctttgtacagcctggctcgtgacctccccaccttcctttcttattctctcccctagctcagttgatagaatccacactggactctttgatgctcctcaaacacactcagcatcctcctccctcaggcctttgcacaatttgttctcttagcgtgaacactcttccccagatatctgcattgctaattctctcatcttctaagagttttgtctcctctgccacctgttcaaagagacctacccgaaccatctattcaaattttaaccgcttacccttcacgtttctgatcttttttcctctattctatttttcccccacatttgtggtatattataaaatttattaattatatttattgtatatctccttgaactagaatgtaggcttcatgaggacagggacttcactctccaaaacatcctgaatgccaagaatagagtctagaataaaatatgtaatcaagtatttgatgaaattattaataagtagatatgttagaaaaatctcatggtatttcataaaataatcagaaaaatcatgtgtgtgtgacaagagatcttaggaaacatatggtccagcgttttttttttttctttttgtcaacataactgtaaggattttttttttcaagcaaaatcaaaacatattctacgtgtgaacgaaatatacattctttcatccctcaggcagtcgaagtctttgttgttctgcagaaaaacattaattattattattattggttttgagatttttgtttggtttttgtttttttgtttttcagaggcctttctttggagccctaaattttcttcaaggatggtctcattttactgaagagaaaattgatggcctaagaggttatgtgactttcccagtgatacatagccagtgactgacacaggcacagatagcttgcccagtcgcgtcccagggtccctcatctatagcttcctgcagttcctccctgcatgttgacctaaaaaagaacttaggagccaagacttaagaactctgcatttctggctgtttgaattctttcctgctcactgaggtttctgttatcttctctcctaggctgacacaggcaagaatttagtcacrctccccaatacaactgccactgsaattctgtgcagtgacgagactatctggctggagcctgaagttctcttttcagggcctcgtcaaggtgagatgatctagagaaaacttcacacrggagtgaacaaatgtttctttcaaagagattaagagttttcctaagcatgtgctctatttcgtagcatttsagtttcctcaaatcaattaccagaagtattgtgggaaaccttacacatatgygtatggacttggcttgaatcactttgttccagatagggtaattaatccttcttactmatatttgaacagtgctttgagtatatgctagtcaagtaaagcatatygactgattgcttgattgatttttctttctcacaaacagctctgtaagctgaatgkcaaaactaaagaaacttgggtttggcaakagcctgattcatacccatcagaacccatctttgtttctcacccagatgccttggaagaagatgatggtaatgaaagcaattgttgtgtctgaatactcttcttactgcagttctgtatgttagttcgttaggaaaggagtaaggttgattattccgtaatactcaaaaaygatccttaatactataaatagagcagtactgaagaattaaaactatttgaaaagaattttcatcttttgatcaggtcttgttgattaccagtagaaaaaaatgtcaaagcaccatttggtgtcacgatggagcatcaatgtctgctctagatgagggagagaaggaagaaaaaatggcaacatgaattccaggtttttgccttccctgacgaagacatatttctaaaaaaatagcaattctaagaagggaagctaagtattatagcagatacaagagaatgagaaggcaggtctgtgaatagttttcatttgttctttcggtaagctagggcttgaaaaaagacccagagccacaccagcaactcagatacagcaactcaaattacaaatcagcagtgttagttaactgcttctcagctgggacagggagatagattacactctatgggattaaaatatggaaaactaagagaaatgagataaagaattgtggagccatttcacactaaatgattttatatatccagtcgaagctgtaaaagatttgttctcattttgttcgaaggaagtcagcttccagatcgatcttagaaaccatacatatgatatatcttactgctttcaaagtcttttaatacacacttttcatgtgatcatcacagtttttacagtatgtacagcaggtgctatatttgtatgttacagataagaacagatccatttattcagtgagtatttaatgagtacctactacgctgtagtcattgtcatagaatattgagatatagcagtgagcaagacagacaagactctcccttcttagagcttacagtgtaggtagggtacataaagagtttaaaagacctctttaggtggtctcatgccaggtggtacaagagtcagaaaaagaagtcaggtcatatggttttctatatttgtcaatgtaatacctcctatattatttcaatgacattcaatctatagcttgggcttttaaaaactcaatattgcctaatttacttctgataaacaggtgtagttctgagtgtggtggtgagcccaggagcaggacaaaagcctgcttatctcctgattctgaatgccaaggacttaagtgaagttgcccgggctgaagtggagattaacatccctgtcacctttcatggactgttcaaaaaatcttgagcatactccagcaagatatgtttttggtagcaaaactgagaaaatcagcttcaggtctgcaatcaaattctgttcaattttagcctgctatatgtcatggttttaacttgcagatgcgcacaattttgcaatgttttacagaaagcactgagttgagcaagcaattcctttatttaaaaaaaaaagtacgtatttagataatcatacttcctctgtgagacaggccataactgaaaaactcttaaatatttagcaatcaaataggaaatgaatgtggacttactaaatggcttttaattcctattataagagcatattttaggtacctatctgctccaattatatttttaacatttaaaaaccaaagtcctctacacttgatttatattatatgtggctttgctgagtcaaggaagtatcatgcaataaggcttaattactaaatgtcaaaccaaactttttctcaaaccagggactatcatctaagattaattacagtaattattttgcgtatacgtaactgctcaaagrttatgaatcttatgaatgttaacctttccgtttattacaagcaagtactattatttctgattttataataagaaaatctrtgtttaatcaactgaggcctctcaaccaaataacatctcagagattaagttatatattaaaagcttatgtaacataaaagcaagtacatatagtagtgactatatttaaaaaaacagcataaaatgcttaaaaatgtaatatttactaaaatcagattatgggataatgttgcaggattatactttattgcatcttttttgtttaattgtatttaagcattgtgcaatcacttgggaaaaatattaaattattaacattgaggtattaatacattttaagccttttgtttttaaatttcttttsttccagagattgtttaaaaataaatattgacaaaaataatgttttatatcttaattctagtatctgttttatgcttgaaagcattacagatcatgatacctaagatgatcagcatggtgtttgactaggtaaaaataggttgaaggaacagactgaccagggtacctgatgtatccatttgatctttatttagataagatggaaactcattttttaaattacaaatactcagtaaagcatacttttcaaagaataactaaaaatacaaaaaagtagaaattgtaaagtaaaatcatacagagctcatctaagttcaactgctcttaagatttgggtactggtctttttcttcttttctattcctgtagattttttttatgtaatcattatttttccatcagtaattactagatagaactaaaaatctcaaaacagaaagagaatgccagggaactgcatggaatatgtcactgtagataaatatcaatccattggttcctgtctctagacatgatatatgaacagaattccacaaagaaaactatttttctattttttaaaaaatgtagaaaattaattactgaaaaattactaagttttagacttaatgtcttcaaattaaaaaaaaaaattcctacaattccacttcctacccttgccaatcaatgattccctggcttcttcccattcattttttatgaagcaagtctcacaattcaaggtgaccatatctcctcctgctgtacgatcccctttagagatcaccaatgtgtgaagaaaggaaagaggcaaatctacgataacatttggctaataccatttcaccatcattggcattctcaattacaattatcactacaattagagcaaggagacttaggagctacttttcaagtgcaagatagaatataagctttaaaaacttaaattagaataagagatatttaagttatgtgggagagattaactcgtaaattcggactttctaggaaacacctactcctctgagcgatctagagaattatgtcccatctatacaaaagaaaatctgttttcagaaaaataactcaattgaattaatataaattaacctgttaataagtagttatttttaaataacaagctgtttgaagcctattttttcttccatttttggtgccttatatttgccacagccaagacgaaaagataataaaatctttgacataatatcatcaaggggtaatcagtaactgataactgcctcatggcagataatctagacagtccctgtcctatattctaaagcagaaaagaccaacagacatcaaagggagtctgtcttccaaggattctatggcagtattactccatcatcccacagtctggctgaggagctaaatgcagtattttcttctgttcagcctaataggaagagtatcaatgattagagattataaacatatcccctaaggaataccaaatctggtacaatgcaatctcaatgagaaaacaatctctgaaagacaagagaaaaaaaaaaccttatttatcgagtgcctactatttactaagcatttttattcctcatactacacccatcatggtactattttcaccattttaaagatgaggaaagggaggccaagttacgttcctaatgagcaataaaacctacagttttgtagaattctgtgaatttcatattaggaacagataataattgttaatatatatgcacctaatagatccctaaaatacatgaagcaaaaaccgagagaatgcaagggagaaagagataattcaacaatcatagttggagaccacttaatgcctcattttcaatattggacagaagaactaggctgaatatcaaaaaggaaacagaaactttaacaacactatgaaccaagcaggtctaacagacatctatagaagaatctgcctaacgatagcagagtagtcattcttctcaagcacacatggaaacattctccaggctagaccatatgttaggccataaaacaagtctaaataaatttaaaattatttagatcatacttaaaatgttatctgtccacagttgggataaattagaagtcagtaatgcaagaaattttggcaaattcacaaatatgtggaaattaaatcgcacactcttgaatatccaaaggatcaaagaagaaatcacaagagaaattacaaaatcctttatataaatgaaaacaaacacaacataccaaaacttatggaatgcagctaatgcagggcttacagtaaaatttatagctgcaagatacatatattaaaaacatatacctttattaaaaacaaaaagcatctcaaatcaataatttaaatatccaccttaagtactaaaaaagaacaaacctcaaataagcagaaagaaacaataaagatttgagtgcaaacaaatgaaacagaaaacagaaaataagagagaagattaataaagccaaaacaaattttttttttttttttaaatatcagggtgggcacggtggctcatgcctataatcccagcactttgagaggccgaggcaggtggatcacttgaggtcaggagttcaagacccgcctggccaacacggtgaaaccctgtctctactaaaaatacaaaaattagccgggcatggtggtgggtgcctataataatcccagcaacttggaaggctgaggcagaagaatcgcttgaacccaggaggtggaggttgcagtgacccgagatcatgccactgcactccagccttggcaacagagtgagactctgtcttaaaaatgaaaaagaaaagaaaagaaaatatcaacaaaattgacaaaatgtttagctagagtgatcaaggaaaaagataaaaaacttaaattactaaaatcagaaataaaagaagggatatcactaataaccttaaagatagatatatatatatgggaatactatgaacaacagtatgccaataaattagataaccgacgtggaataggcaaattcctgggaagatatgaccagcaaaaagtgactcaaaaataaatagaaaatctgaatagaccaattagagtaaagagattgaattagtcacgtcaaaacttctcaaaataaaagctcaggcccagtggcttcactggtaaatggtaccaaacatttaaagaattaataccaatccttcacaaacttttccaagaagtagacatgaataaaatactttccaactgattctatgaggcattttaccctaataacaaaaacagacaatggcataataagaaaagaaaagaaagaaaactacagaaaaacatcacttatgagatcataaacaaaagaaaaggattctcaaattcaaaaatatataaatatataaaaaggcttctacaccaagacaaaatgggatttctcctaggaatttaaggttggtctaacatccaaaaatcaatattaatacaataatataatataatataataatcaacattaatagaataaaggacaaagcccatacaattatctcagtaggttaaaatataacatttgaaaaacattcaataatcattcacgataaaagataaacattagaaataaaagggaatttcctaattctgataaagagtatctatttaaaaatccacaggtaacattttactttacaatggaaggctgaagttttcacccaaatcaggaacaatacaaggatgtttgctctcaccacaactctttaacattggacaagaggttctagtcataactattaagccaaaaagaaaagatataatatgtatatgattgggaagaaagagtaagactatatctattcccagattatataatttgcatatagaaacttctaaggaattcacttttaaatgtatatgtgtgtgtgtatatatatatatgaaccaataaacaagttcagccaagttgctgatacaagatcagtatacaaaaatcagttgtatttatctgcaccagaaatgaacaacctaaaaaataaaattgagaaagcaattatgtttataattcaatttaaaagaatgaaataagtagaaataaccttaaaagaagttcaagacctgcatacaaaaactacaaaacacagttggaaaaaaataaagaattcctaaataaaggaaaaaacattccatgctcatgaattggaagatttaaaattattaagatggcaatacaactcaaatttacctacagattcagctgaatcttgaccaaaacactagcttctttcaagcagaaattgacaagccaactctaaaatccatatgaaaatacaagacaccaagagtagccagaacaattttgaaaaggaagagcaaagttgaagaactcacatgttttcatttcaaagtcgactacaaggcaacagtaatcaagaaaatgtggtactggcagaaggataaacatatacatttagtgaataaaactaagactccagaaattaaccttcacatttttaatcagttgattttcaacagaagtgctaagaaaattcaatgggaatttttaatgttagccttagataacaggtatattcaaaatatgtaaaccacaatatcaaaaacagcccagtaataaagaataacgaagatactaaaatttatagtcttaaaaattgaatggaagaatcataatctcacaaactataaatgtacttagtgtcatgtaagtaagatgtgtcaaatgagcacacttcattttttcctgacttcaagggagttcatttgtaactagcagactttgcatttaagaaaaatattcataaattaaaattatggtgtgaatacctagagttttagatgaagttatgtaagtcttaaggtaaacgctgaacatagaggttactacaagacatgtaataaaggaatttggcaagactctgttgccatccatatgggtatggacaagtctcttcacctctgttcttcagtatcctcaacattagagtaattgaatgatgcattagtccattttcacactcttacaaagataccacctgagaagggggatttttgaagaaaagaggtttaattgactcacagttccgcataggtgaggaggcctcagaaaacttaacaatcatggcagaaggtgaagggaaagcaaggcatgtcttctcatggcagcaggagagagagagcaaaggagaaagtgccacttttaaaaccatcagacctcctgagaactcaataactatcatgagaacagcatgagggaaactgtccctatgatccaatcacctcccaccagccaccctccctcaacatgtggggattacaattcaagatgagatttgggtagggacacagagtcaaaccatattagatgacataatctttatggttctttctagctttgaaaattatgtataagacagtaaggcataaggattatgagttctacatgcacttagaattagataatatcctcagtattgactgattatctactgtgtgccaggctctattccaagcaccgtggtgaaagaaacacacaaatatccctgtcctcatgaagcttaccttctagtgggtgaagcaggtaataaacaatataagtaagtaaaaataartatgttagatactggttagtgttaagggaagaaaataaagtagggaagggggacatgaaatgttgggagaaggttgaaattttagataggatggccagggaaggtctttctgacaaggtgaaagttaatcatgtacgagggaagaatccacagtagtaaagaaggagtatggagactgagggcagagagtagtaaagaaggagtatggagactgagggcagagaggtagagagctcttaggaactgggaggatatgtgatgacatgctgacttgaaaactgcaaaacataaaagagttgtgagcagagatgtaagatgatccggtttacattttaataacatattttgggtaccattctcagactatattgcagaagtaggggaagctgttaggaaacaattgcagtaatccaggtgaaagaggatgaagatttggactacaaaaatggaatgaaaagtgataagaaatagaattctgaatatattttgaggagagagccaacataattttctaacagactagggtg

SEQ ID NO: 94977 - DNA, 44934 bp, Homo sapiens
tagatatacagataaattattcatcatttattttctaaacattcagaattattatactgatacagtttaaatatatgtgcagatttagagaaagacaatgataaatctatcctctcaaacgttaaaagcttcaaactcccctccacacaagactggaaaaaaaattgggaaagaattaacagaaagatcacaaactacatttagcaaccacatatcacaccagttacaaaaagcagtggaagtcaaaatatcactttaccctgctcttgaacaatgtgataccttaccaaacactcattctctatcttgtgttcaatttctaaaatgcctaattacctcaactttacatctacacccttatacttcccctacttaaaaacccatccacatgacagaatttcacttgtagatctctcctggaagggctgacatgtacaatagttcaagttgttcactgaataagagcatccaggtgaagggacaagtaacagctgagattttagattaaaaatggtacacattccttctcatgattgttaatgagcagtaaggtctatgttcccttgtcttaaatcttggcagactctgaagctgtttgagcagtagaatatagtagaagtgattctgttctagcttactggcttagacatgaagagactggcaactttgacttcttcttgcttagaaacacttgctttttttttaagaagtcttgcactgtcgcttgggctggagtgcagtggtgcgatctcggctcactgctgcaacctctgcctcccaggtttaagcgattctcctgcctcagccttccaagtagctgggactacaggcaccccccaccacgcccagctaattttctgtatttttagtagagacggggtttcaccatgttgttcaggccggtctcgaactcctgacctcaagtgatcctcctgcctcggtctcccaaagcgctgagattacaggcgtgagccactgagcccggccaacacttgctcttataacccagccaccaccataggaggaaggccaacaccgagaggaactgaaaccccaggaaagtcttagctgagctcccagccaagagccagcaccaactggccagtctggtacatgtacctaagtcaatatgctgcagcccacactgtgtggacaagacatgagcaagccctgcctagtccctcccaatcccaaattttggaacaaattaattgagtaaaaaatttaccccaatacgttctgtgtaacattcaaactctttaccatgccatttttagtccttaccaacctaactctgcctaccttttcatacttctctcctactactccttaatcaaatctccctctctagctagatttgatgatttcctgaacacactttgagtaattctgcctcccaaacatacactgtaccttctacctgagcagctctcttctgtctctgcccaccctctcagatcatgagccaccttcttttcaaaatcttcctaactattctacttcatttctctctaagtctgtggctcttttgctctgtctcatttggtacttatttatagcttgggtccattaatcattttcttcttgatattctttattaaaataacatgtaatttagcgctactccaaatctcattcaaactgtttgccataatcaagtgtggaaattgaaggtaatcatttagaaacttttgtagcaatttgatagagtaattttatgcacattgaaccttatcataaaataattagccttgtctttgccatatcattttctagtaattagtatttttttaaaaaagacttttttcagaacagttttaggtttacagaaaattgagcaaaacatacagaaacttcttatataatccctgcccttccccattccctgcaacctctagtattaacatcacacaccaaactggtacatttgctgtaattgttgacacatcatattacccaaaatccattgtttacatcagagttcactcctggtattataccacaagggagtttgactaataattgatttttaattgcattttacaaaagtatcagttatgactgattagaaataaaaagcaaaactggtctaacagagtttgagaagtactgttaacaatgaaacctacttgaggcactagactatagcacaaagtttctcaacctcagcactattaacattttagatggatcattctttgttgtggagactgtggtgtgtattgtaggatgtttagcagcatgcttgggtctacgtagaccgtcagatgctagaatacttccaacccctgagtagagccaatcaaaattgtttccagacattgccaaatgtctcctgggtcaaaatcaacccaggttgagaacactaccataatggttaagagcagtcctgcaacgagggtaaattgttcaagctccaaatctagccctgccacttaattaactgtatatctttgggccagtaaattaactcattttccccattagtaaaacgattaataaaagtactaacattaaaggcttttgtaaagcaaaaatgatgtaacaaagaatatataaaccacctagaacggtatttgagacatagtaagaatccaataaacaaaagacattgtttctatcacttctgggctactcacagtgcatataaaaatgaataggtattttgtcccattcttagatccaagggaaaccacagcttagtgatagtgcacaggtagagacagatatgaaaataattactatgtgtatttataaatgttataaagaggcaagtgagcgaatgactgtcttaaactggtttgtgctatgggtaagaatgtacaggcataactctttttattgtgtttcactttattgagcctcgcagacactgtattttgttgttgttgtcttacaaactaaaggtttgtggcaagcctgcactgaacaactatattgatgccatttttccaacagattgtgctcactcttcacatttctgtgtcatattttgataactctcacaatatttcaaaccttttcattattatatctgttatggtgattgatgttactctgtaattgttttagggcaccatgaaccatgccaatatcagacagagaacttaataggtaaatgttgcgttgtgttttgactgctccaccaactggctgttccctgcctctctccctctccttaggcctccctattccctgagacacaatgatattgaaattaggccatttaataaccctacaatggcctctaagtgttcaagtgaaagcaaaaatcacacctctctcactttaaattaaaagctagaaatgtttaagcaaggtgaggtaggcatgtcaaaagccaagataggctggaaactacaccagttagccaagctgtgaatgcaaaggaaaagttcttgaaggaaatttaaagtgctattccagtgaagacatgaatgataagaaagcaaaaacagccttattactgatagggagaaagtttgagtggtccgggattgaagatcaaactagccacaacacgcccttaaaccaaagacgaattcatggcaaggtcttaactcacttcaattctatgaaagctgagagaggtgagaaagctgtagcaaaagagcctgaagctagcagagcttggttcctgaggtttaaggaagtaagctatctgcataacatgaaagtacaaagtgaagcagcaagtgctgatgcagaagctgcagcaagttatccagttctaggtaagataattgatgaaggggctacactaaacaacagattttcaatgaagacaaaacagccttctattggaagatgctatctaggactttcatatctagaaagaagtcattgcctggcttcaaagcttcaaaagacaggctgactctcttgtaggggctaatatgggtggtgacttgaagccaatgctcattgaccattctgaaatatcctagggctcttattcttttaaatctactctgtctgtgctctggaaatggaagaacaaagcatgagtgacagcacatctgtttacagcacggtttactgagtattttaagcccatctttgagacctacagctcacaaaaagattcctttcaaaataatactgctcaatgaccacgtacttggtcacccaagagctctgatagagatgtacaaggagattaatgctgttttcatgtctgctaacacaacatccattctgcagcccatgaatcaaagaataattttgactttcaagttatattatttaagaaatacattttgtaaagctatagctgccctagacagtgattcctctgatggatctgggcaaaataaattgaaaacttctggaaatgattcaccatcccaaatgctagtaagaacattcatgattcacgggaggaggtcaaaatatcaacattaacaggagtctggaaaaagttgattccaaccctcatggatgactttgtaaaggtcatgactttgttcaagacttcagtggaggaagtgatgaaagatctggtggcaatagcaagagaaatagtggagcctgaagatgtacctgaattgctgcaatctcatgataaaactagtggaaaagaagttgcttcttatgaatgagcgaagttcttgagatggaatctacccctggtgaagatgctgtgaatattcttgaaatatcaacaaagaattcagaatatcacaaaaccttagttgctaaagcaatggtaggggttaagaggatttactctaattttgaaagaagttctacagtgggtaaaatgctttcaaacagcatcacatgctacagagaaatctttagtgaatggaagagtcaactgctgtacaaaattcattattttgttattttaagaaactgccacagcaactccaatcttcagcaaccatcaccctgattggtcaacagccatcaacatcaagcaagaccctccaccagcaaaaagattaggacttgctgaaggctgagatgattagtagcattttttagcaataaaatattttaaaattacagcatgtaatttttttttacacataatgctattgcacacttaataggttacaatacagtgtaaatacaactgttatatgcactgggaaaccaaaaaaatcgtgtgacaggctttattggtctggaaccgaccccgcaatatctcggaagtatgtttgtacattattcatagaaaaagtattattctaataacattttgaaatatttagccaaaaagtagaaaaatgaagcatccaagggaaaacagtaaaactcggacggcaggaaagctcggaaaaaacacaaaaaacctggcgtgttcagggacaggataatccagcgaggcttttaatgtgtataggagaagtgaaaagaaataaggctggtacagtagtttgccgccagactatatgctttaggagagagggaggcattctaggttgtcttgtttttcttaccagcttgttgatactcatgggactcaattacctcaatttagacctctatgtgggcacaagagtgagtaggactcctggagaaacacagacactaatgtccaaggctgcacttgacttcactagtgcccgcgggagaaatttagcaatgaggatgagccatgaggatgattcgggagaaataggaagtattcatggctttgctccctcccccctaatcaaacatctcaatctcaggatcctaagggcagatcttttaggacatcgggcatttccccgtaagcaatcccccctcgctatcctcaaatgcaaactgcggagtctgccacaaacgcgttggctttaaaactcatccctgaactttagatccacccagccggttaaggatatcacgactcaccactgattcttcttgcacccttctgagagccgcgcttagagtaattcgcgcccaaacattcgtaaacagaggagacccggaagtgggtgggaagaaagcggaaacgggcatctaaccctacccctaaacgtcatcaggaatgcgcccatgagagcgctattagattggctggagggagggcggtgtcggcctwcgcccccagagtcgtccggctgacgctggcggtggcgcggtttgtgtgggcttggtgagggcggggaggcctggctgtgtggatgtctgacaggtgaggcgggggacgcagaagtgcagccgccctctcccacagcggagtccaaaacaggcctaccagtgagtaggacgtacacctttcagatcgctccattcttctggctcctgtccctcctctacccctgtattttgaacttttgtcctttctctcccgctctgtcctttacttctgtcttctttaccttcctactgtgacgggatcccactctctgccttctccttaggtttagattttcacttcgaccaacctctagttttgggcgaagtccctggcaattcggaggtacttctggaaagaaggtgcttttaatactttaggggccatgtcggtatcttctttggccacttaagcaccctgaactgttcccgttggcagaggtcactttttgtatggttccaaagggatgcgcctgcttcatggctgcctcccttctaggttgtgggttatgttattgtcagggtttttctaagagttttcgggaataaaagtgattttctgtgtgtaaacaggattaagagtgtaaacagtgttaagagtgagaggtagaatagaaaagacaggtctaaattgacataaaagcttacattactaactcgttctcagttttatctagaaagaaggtggtcttagggaagctcgaagccctggataacgtatgtgtgtaaagttttaaaccacttgatgattttctgccaatataattttgtgtttaatgatgtacttatgctaatatcaaatataattttcatgccctatgtttccatctccaaacccaactagttgaacatcaaagtaccttcttgaagtattaatgtgcaatcatacgtcagcagccaaagcttgaaacttattggttcaagaaatctttttctcactgatttgtttttgaggtgtgggggtgggattaatcattgctctttaactcattttagttgtcagtaacatatttgctttgcatgttgcttctttgaatgcttgaggcctctcttgatggtcttctgagaaaattcagaggtcgtattgccatccgcagtagttgtgtttttatctaaaaatggtgtctgtttccagcctccaccaattcacatgtgattttcaggaagtcacttaaacggggctctttcctattagttgttcagatttaggaaagcccacgtgaaatgagtgtgatatttcctgccaacagtttagtctcaggtggttttcaaattaccttttacaggattactattgaaacagtttagttgttgcttcattatttttttcatccaccttttaagctagtaaatgtagtggatggcttgcaaaaagatggatgacaaggaccccatggatttaaagaataaaaatcgtgctagtattaaaaaaatggaaggtttttttgttttgttttgagacggggtctctctctgttgcccaggttggagtgcagtggcacgatctctgctcactgcaacctctgcttcccgggttgaagtgattctcatgcctcagcctcctgagtacctgggattactggtgtgcgccaccatgcccagctaatttttgtatttttagtagagactggrtttcaccgtgttggccaggctggtcttgaacccctgacctcaggtgatccacctgcctcggcctcctgaagtgctgggattccaggcgtgaaccaccatgcccagccttttttgttatgtttccatttagactttgttctatgtactttttacatagttgaacctgttgcacttacaattacgtgtcttgagtcttttacttactactttttgagtttgtttctctttttttgggaaactatgcataacacatttttaactttttacttatacatatatttacagaaactgcataaaacataactgtataatttgatgaatttccacaaacagaatatatctatgtaagtggcaatcagatcaagaccattacccccaaaagcccctctcttgctcctgttgtattctagcaaccattaagtaaccattcttctgacttctgacatcaaagattagttttgccagctttctaaacatattttgataactacatgaaattctatcatttgtatatgctgtaattcacttattcatatgttatgagatacttacgattttcctaagttttctctattacaaataaaactataggaaacatctattttatatattactacagaagctttcccaggagtaatgttcctcagtggaatggcataaacatttctgaagcatttcatgtatattgacaatttactttccaaagtagttaaaatagttaatactgtcaccagtggtttatgtctcttgtttaacgaccccataataagtgttgagtattgatttcatttaagctttactaaactgataggtaagaagtggtatggaaaataaaatttgaaactccctttacttgttgccttatccagtataaaacacatagtatagtgaatatattaatgtttgcatctcaatatctttttaaacaatgggctctatatgtttacgctgtatgactctgacaagttttagtaattcaggtaaacagtttacggctttgtgaggtgggattttgatcaagcgactttatttctctgagcctcagtttctacatctggaaaatgatgacgctgaacccagcaacctagtataaaagtctatgctagttatccggaatatgcagctctaatgttggagcagtttataaactagcacagaagtagattattgaagaggccatttagctcaccttatgggttctgggatgaattgtgtgcatattagttaaatgcaaggactttgaaacaggctgcataggttccaatcaatgctggctcttctgtgcctcagtttcctaatctgtaaaataaggataataatagtacctacctcttaggggtattgtaaagattaaaattgctactctctgtgatgtctttatagccttctatgttactggcacatagaaacgctgcaaattggagataatgccttagctgaattagccagagaagaacattttaggcagaaggaagagcaagagcaaattcagaaaactttgacatatgtgcagccaactgtaggtaatccagtatttctagtgcacaaaatgcataaagaggacaaagacagagatgggtctgagggggaaacagagaccagttcatgaaggccttgaatgcctgtttgtcttattcatcacttttttctctattacccaacataatgtcggtcataaactgatatttaataaaagcactttgaatgaaaaaattaattaggaggctgtagtatatcttccacatgatasagagtctttgaaaaattccatgagkagtgtgacatagtcatatttacattgwtgtcattgtatggaagggattcgtatagaatggagtasaaaaggagtaagactggtcagtaagaccagctaagaggctactgaggaaaaagactgraactacaggactgatagtaattgtgaagaagaggggccaaagttataaaatatcaggtgcaggaagcagaaaasgggaagaaatgaaatcagactaatacatcctctttcttttctgttcctttcttatgagtagctcctatttcccaccccctcttctaaatgwttttactctatgtttctttttctaggtcagttcttatttctattgggtgtttccatgctccaccatgttaagagctaagaatcagctttttttactttcacctcattacctgaggyaggtaaaagaatcatcaggctccaggctcatacagcaacgacttctacaccagcaacagccccttcacccagaatgggctgccctggctaaaaagcagctgaaaggcwaaaacccagaagacctaatatggcacaccccggaagggatctctataaaacccttgtattccaagagagatactatggacttacctgaakaacttccaggagtgaagccattcacacrtgkaccatatcctaccatgtatacctttaggcccyggaccatccrccagtatgctggttttagtactgtggaagaaagcaataagttctataaggacaacattaagggtgagattttaatgtaagacataatatttatgataagtcatatgcctcctagttttttatttttkgggggttaatctctgtaaagatgatattcactctataattttgtagttaaagactatactctgaaaaaagtggatttttttaacttctgtggtcaaaaagataagtgaattagaataaggtgctaaatttttgaaagaaaacaacacatgcacgttgtttaaaaggaattaggtgaggtaaagttgcatgaagaaaagaagacattagctttgccttcgaaaaatgttcaattaacattgttgggatagcgattggagaggaagatagtttagatgatgcccaaagaaagtgtaaatgtgataacgtggtacaaacatattcagtgcaacctggcattcattcactgaaaattatcttaactattatttcttctttctgagctgtaataaaattgtactgtttgaatactaaacttgtagatttataagtttgtattgcccatggaaggttgaacttacatttagtatagactattttagttatttaaaaattttgtacgatggtcataattctgttttccagaatatttgaatagccaggaatcctttgtgaccatattagataaaagaacaaaatagtaagcaagcatacaaatgctaagttatttttgccatatatgaacagccagatcttttcatgaattttagaaatatttcaatcaagtaccatatcttcagatagatacgagatgattgagatttgttgtttctcccattctttcctttagtgaggtctggaactaaatttgtgcattttggcacaagggaaacaactgactctcttaagaagtgaagtatctttatttaagttggttttgacatgtatgagcataaaaatagttgttataaaagtgtactgttatgagatgaatcaacatttttagtagtgttaaaagtaaatcattttaccttgattcyagactcttgaatcttacattatttttctttatatatttagctggtcagcagggattatcagttgcctttgatctggcgacacatcgtggctatgattcagacaaccctcgagttcgtggtratgttgkaatggctggagttgctattgacactgtggaagataccaaaattctttytgatggaattcctttagaaaaaatgtcagtttccatgactatgaatggagmagttattccagttcttrcaaattttatagtaactrgagaagaacaaggtgtacctaaagagaarcttactggtaccatccamwatgatatactaaaggaatttatggttcraaatacawacatttttcctccagaaccatccatgaaaattattgctgacatatttgaatatacagcaaaggtatactttgtggttattataggtttttctatagttccttgaatgtaggaatttttacaacatgctataactgaatttaaaaatttagtctgagtaatataaatttagaatgttttgttattgttactttttgtttttaatgtactaattttatgttctgtcgttacttgcaggaatctgggcaacagatctttactgtgttttctttattcctaaaatttaactctgataattgttagattcagggaggtcttctacttacatttttaaatttccctccgaaattcagatgcagttgtgaagtagacactggtatcagacaaatggggattggaatatcagctttatttctgctaaaagctgaattggaagatatcacttatcactcatatctgcaacctcaaggaggtccctaatattcacccttgaattaggctcatctttcccaataagaatgatgggaaaaatccttccatagggacacattttcctccttcattttcctgtgagcaatttgtttatatttccccccattattcactctttgcttcttaccagcaacgtactccttctccttacctacgttaaagttagatcattatttcatggcacagagaaaatcgtcatcaaccctttttatctttatcaacccttgtaattactgttatctccaaactctagcaagcattgtgtagcaagcattttatgtttggttaactcttggtaaagatagtttttcttggctgtgcaggatatgtgtgatgtactctacctaacatgaaattttaggggaatagtggaaatacagtttttgtagtgattgtggtggaaagaacctgtctgggatatgcttagtattaaatgtcacagtaaatcaaactgaaatctttgatttttaaagccatgcattttatcccattttgtttcaacatatagtactaagaatcaaatcattttattttttttcctactgtgtacttattcatgtttgatgccttcattcaaactagaaaattaataactagtaaataataataaatttatacatcttaagcagattaacccaaggtttgggtctacaacctcttatgaggtccaagtcattggtttggaattaaaaatgcttcatttagttctcaggccaaaggttacattcctaacctcagctagctaattccacaatttaaactttcagaatggttagtataaattcttgtccaccagaaaaataaagtaggtacagtcctgatgatggttcatggacgaaccatttaaattggaaagcaaattaaatgtaacaaataagcattaaatattttgttaacattatgaactaccaagtttatttgaatttaacatcattttaaaataatgtttatgcttagaaagtggatttaataggaccttttaatatttttacttattcactgttacaatttttttttttatgtagcacatgccaaaatttaattcaatttcaattagtggataccatatgcaggaagcaggggctgatgccattctggagctggcctatactttagcagatggattggagtactctagaactggactccaggctggcctgacaattgatgaatttgcaccaaggtgagtaaattaaacctagatattgtttcaacattaagaaatgcataggaccattttatatattgataaaatgaatttataaatataaatgtcaggctagatttagattttcttatattttatctgagtgataatgagagaaaaagccaatatttctaataaaaaatagaattaaatttggctgtacttctttgtaaatttgaggaatatcttgtctccagctatttagagaacacaattaagttscacattttaacaaattacattaaaatgtaaacataatgttgagacagttttttctaatttttccattttagaatacagaattcatctattattatttttttttctgttgcactatctaatgtaatgttttgggatccactgtgctgttgaaacatttgtttcacaacagtttcttaataatgttgtatgaaaaatatgggaaaacttaaatgtagtttatgaaatatttaaatttggaagtcgaaagtcattcggtggttcaatcagtacagcaatcacttgctaagctttgctgtgccaaacactagcctatatgctgacaatacaacatgtagaaaacatagcttctgcctttagtgtttatagactactgaaatgctcctttgtaccagggatttgtgtacttactgtgacagcagttcccaaagtgtggtctaagaacagttgggcattgctaagactctttctggggtatttgagatcaaaactgtttttatgcttatgttagagctttatttgcctttttcactttcattttctcaagaatttatagtgatgtttttcagaagctacacgatatgtgatactgcaacagattgcagaaacagatatgagactccagctgttttctcttaagccatacattgaagagatttgcaaaaatgtaaaacaatgatgcttttattatatatatatatatttttttaagaagcatacttatttttcataagaaatgttactaatgttaacatgttgtgggtttattttgatttgatttgatgattattgagataggatcttgctctgttgcacatgctggagtgcaatggcatgatcactgctcattgcagcctcagcctgccaggcttaagggttcctcccacctcaggctcccaagtagctgtgactacaggtgtgtgccaccatacctggctaagttttaagttttcctgtagagatggggtttccctgtgttgcctagctggtatcaaactcctgggctcaagctatcctcctgccttggcctcctaaagtgctgagattctaggcagtagcctctgtgcccttccttattgttacttttgaatgaactagtaaataaaatattgatagatattatacaaataaagaaataaattctttggaattttcagtaagttttaagagtagaaagggaacctgagatcaaaatatttgaaaactgctgtgttaagaacttctttcaaggctgggtgtggtggctcatgcctgtaatcccagtgcttcgggtgaccgaggcggacagatcacatgaggccaggaattcaagaccagtctggccaacatggcgaaacccagtctctattaaaaatacaaaaattagctgggcatggtggtgcttgtctgtaattccagctacttgggagggtgaggcacaagaatcgcttgaacctgggaagtggaggttgcagtgacccgacattgcttcattgcactccagcctgtgcaatagaacaagactctgtctcaaaaaaagaacttccaaaaatgtgtcagaagtagatttgcaagctttgtgcctttagagacaggcaagtaacctaaatgtttaaatcagcacagaatataagataaaagggagaggtgaagggcacaaattggagaagtatatgcctagaccaatgcacaatcattcttttacaaaacacttttctggctaaacaaagcaaatttgctgttttatttcattcataggtgactcctgtcttacatattgagtattcctaaaatatacattttttaaataaattgaatctttatttaatgaagggcataggaagagattctttcattaagaaaaccaattacaaagtgaataattcttacctgaagcaaaatttcttccatatgcataaaactgtaattttatgttaggtttaaagttacataaatgtacgtgyactgatcttaattcaaattaagttcttygaaattaaaatatagaccttgattttctagtgtgtgatacaattagttttattttctgctctatattgttaactttaattaaattctggacctaacgttactattttaggttgtctttcttctggggaattggaatgaatttctatatggaaatagcaaagatgagagctggtagaagactctgggctcacttaatagagaaaatgtttcagcctaaaaactcaaaatctcttcttctaagagcacactgtcagacatctggatggtcacttactgagcaggtatgtatataatttaaaatgtagaattttaataaagttatatatatatwtwttttytgagcaatgtggcacaagcaggaaatagaattaagaagctatctgttaatatttgaaatgataaatattctgaagcataatgtatacttaggtttgtaattatacataatataataaataaataaataaaaattgtctccctctggtggttaacaatataaaatcacttacatcctagcttccctgtagtgctgaaacacttgtaaaagtaaacaaggctgggcgagttggctcacaccagtaattccaacattttgggaggccgaggcacccagcctggccaacctggcaaaaacctacctctactaaaaatacaaaattagttgggcgtggtggtgcatgcctataatcccagctacttgggaagctgacgtaggagaatcacttgaacctgggaatcggaggttgcagtgagccargatgacgccactgcactccagcctgggcaacaagagcacaactacgtctmaaaaaaaaaaaaaaaaaaaccaaagaaagaaagaaaacagaatttgatgatgagaaggaagcaaaagtcataagttagtactctcatataattgtaagagttataattcttaacataaaactgcctatttaaaattaattatatatacatacatattttatgtgttaaagttatgtatttaagcaagcatgcaagcagactgtttaaagactrtttttacttgggtaatttaatttgttctcttaaaaattgtatagttatggccttgtttttatacatgttctctttacatatgaaattattttggtacatttaaaaataatttatatgtgcaaagttacattgcttttatacatttaaatgttgaataataactattatactctgtatgaaataaaacttcaggttcttataaatggagaaatagacctggcacagtggctcacgcctgtaaatcccagcactttgggaggccaaggcgggcagatcacaaggtcaggagatcaagatcatcctggctaacatggtgaaaccccgtctctactaaaaatacaaaaaaattagccaggtgtgttggcaggcacctatagtcccagctactcaggaggctgaggcaagagattggagtgaacccgggaggcagagcttacagtgagccgagattgcgccactgcactccagcctgggcaacagagcgagactccgtctcaaaataaataaataaataaaataaaaataaataaataaatacatggagaaataagagatttttagggttggaaggaactttaataatcatttttattttaacctgcttattttttcagctaaagaaactgaagttcagagagatccaatgacttgcccaaatcacaattaggcatgcaataaactagaactcaaatttctgatatctcagttcattgttcatctattttattaacatttattcagtgcctgttttgtacacatcattgtggtagatactgtgaggtagacaaaataatcagcaaagagtgaattatgaaatgaaggactatataatcttaagtagaaaaagaatgcattgttgatatacttatagaaaagtatttaggcaatataaaagtaagcacaacaatatctgatatttcagaggattataagaggcactaaacactgaactctgactcttctaattttggcttctaaactaatttgtctgaatttatttgctattctgaagcttaatatggaaattgacatagaaaatatgcagcagttgctgtttaatcatrttgctgtttatagttgcaatatctatcacctgtttctttgagtttttgttttttatcaaatattttaggatccctacaataatattgwccgtactgcaatagaagcaatggcagmagtatttggagggactcagtctttgcacacaaattcttttgatgaagctttgggtttgccaactgtgaaaagtgctygaattgccaggaacacacaaatcatcattcaakaagaatctgggattcccaaagtggctgatccttggggaggttcttacatgatggaatgtctcacaaatgatgtttatgatgctgctttaaaggtaagtttttccactttgcaactttgttttcagaatttacagatttgtaaagatttatagattttaaaacttacaagtcaagatttatagattttaaatttataaatcaaatcacttacagatttatataataatttaaacgatgtttgcaaaaaaaattcagatttgattttatagttttcaaaacaatccatttaaaaatacatttctattaaagtattttattaaaagaattaaaaagacagctagtattaaaaagctcatacaaagaacagcagtttttgatcatccacttgttttttcctgcttcctggagtaagatacatacttctttgcttatttttgtttttatctgcatagtttaaaatcacatgtatactatttcttgtaattttatcaactgtagacattacacatgagaccttagacactatctattgctttcctagtagggtagtttagattttggctgattcatacccctacttttcctcctcccttactaccaatataattatatctcaatgtaatcttttctgaattcttctaatgttctcatttgacttaaattgttttttctctatttctgctcactattgctgttctttgactcctctttgccattatagtaggaatatattttcatttctcctctgtttaattctgaatcttgaatcccatgtctatctcttggttatttggaagtacatctcatagaaacctgctaaaaatggtgcatgggagataaattatttgaaacttttcctgtttgggaatgtctttattctatttttataattgattaatagcctgactaagcttgacattatttccattcaggaaattcataagcaagtttataagcattgatctgttttttattctagatttttattctggctttcaatatttctgatcagaaatttgatgccattctcattcaggatctttctttctgaaagtattgggacctcttctttattttttgtattgatgtataacttggtgtattttttcctacatggtactgaacctttattgggtctttttcatctcacctttttttaaaaaatatttttatagctctaggaaattttcttgtattatttctttgacagtatttttcttgtcattttcatatgggttctctttctagaactcctagtcataagctacggacctccttaaataatatcctgatgtgctgatgttcttatcttttttttttttttttttaagacagagtcttactctgtcaccaggctggagtgcagtggcgtgatctcggcttactgcaacttttgactccctagttcaagcgattctcctgtctcagcctcccgagtagctgggattacaggcacacaccaccacacccggataatttttgtatttttaatggagacgggggttcaccgtgttggtcaggctggtctcaaactcctgacctcgtgatccactcaccttggcctcccaaagagctgggattacaggcatgagccactgctccctgcctgctcttatcttttctatagtatatctgtttgccttttttttctgtgttcttaaagatttgtcaactttatatttctacttatttttacattcatgtattatatttttgattcgtagagctcatttttgttttctaatttcccccttataattaatgtcatcttcatttgtttcattagtacagaatccatttatattctgaattcatgatattttctgaagttttcttttacatcctgtattgtctccattttctctctgtgctttttgtttttagtctttagtcagagtacaggcttttatttcagtaagacatcttacccttacttctgtctgtatttggtatttgatagttcattgtgtctcgagttcattttctgtagacagtaaactttggttctcctgacagaatgagagaggggtggttgcagactctcaaattgkcttcttctttttagcttctcattttacacttacgtagaatccaatatagattcttctttcttgaattcatcagggaaaagcaggttgaccttgatcctttctgctaagtcatatatcattccactgtctgttttctgccttcatatatgaagctatgattgaaggtttaaatgtttcctgatttcattaaagatgaggttacattgtttctctgcagctcaaatcaaaagtaaattgcattttaaaatatatttttcttayagactttatgtaattatgaaaactttatrtacctaaaaatraagattagagaattgatgttgctttaattttctcccaagacttaagaggttttgtgttttttggaatatacttgttagttgtcttttcaagtractataaacacacaaattctaattaatgactttgatgtttatttaattctgttcttatgaaacattaacatttagtttataattttattaatattagtaattatataacactcataacaaatttatatagtttacacacatttttaatattctcttttagttttgttaatgtttttctttttagctcattaatgaaattgaagaaatgggtggaatggccaaagctgtagctgagggaatacctaaacttygaattgaagaatgtgctgcccgaagacaagctagaatagattctggtaagatagtgagaaagttcatatatgaaatccagtagttaaaaagaaattcatttctgtttgaagatracatgtatagttaacaaaacaaaaataatgaaaaatggaacttgggtaaattttttctcatatacttgtatctatctatatatgtattttcacatacatggatgcacacaggcaagcatatktacaaagtgtgtgtggatgtctaaccattgtatatatgtacatgtttgtgggtagatgtcattaacattttgaagatgacactgttgatgatcacagtgttctctgcattggagtattcattcattcaatgaatacttctttagtttattttgtttgaggcacttgctatgtctgggcatacaactgtgaacaggacagacatgacctctatgacctctatgcacacaaatcttacattctagtaaaagagaggaaaatgaacaagtaaataaagaattatagatcatgataagtgctatgaaggaaatatgaaggagtataaccaggggtaggggttgtgggaagttttatataagagtaataatctggtagtttgaggtaaaatatattctttatcatgtaaggaagtatctttgtaattttgatttactaatagattatagaagggttctttttttgtttaaaagtgactggctgaattcaaaaaaatattagaaaagctactgggtattcattctctaccttataaatcttagatggcagctgctctgattgttatttcgaagtgttaaaagatttattagaaaccgtgggaaagtgtatattaatagtttggtagaataatgaaagtccttccttacagagactctgacatatacctctactttcctctcacacccccttctcagattgggatttgctgatctatattgaagttgcattaagaattaagaatactacttaaagatattaaatttataaggaaaatacatcataaccagagcattacaattaggtaattatttgtgaataaaatttttctttgggaaattaccaggttctgaagtaattgttggagtaaataagtaccagttggaaaaagaagacrctgtagaagttctggcaattgataatacttcagtgcgaaacaggcagattgaaaaacttaagaaggtattaatagcttgcttttttttttttttttaagtattttctgtgttctgggctctggctaagcttttaaactgtcctgcttaaattaatccttacaacagcatgaggtgtgtattaatttccatcatttcaaatgtaagggaactaaagataaggcattgagaaacttgctcaggataaatagacaaccaggactcagtcttagtctgttgacaccaaaaacttgttttaaaccatgatatctacctctgtgaaacttataagttgttattaaaaaccacactacaataataataccttccataatttatagattaaaaccaaggcttagatgattatrtaacttactaaaaattaaaaacagaataaagtttagagttattatttgaacccagggcttcttattgtaatttctttcaccagaatgatggcatctgatactactttgaaataattacttgctttttgatttttaaaattcaactatatttggtagtgctttagtaaggtacagtttacaataaactttatttattttgattgaaactagagtatcgtattcccttcttatttttagtttgtcactgagttgatccagagcatatgaaatactaaaatagataaatcaaattaattgtcactgttgtaacctatatatttttgttgtatgaagctactttggcctcttaatctttggcatttgtaagtactgctgtttccaaggtagggagcttatacatttaatggttttctttgtttacttttcctgagattgtttaatgtatggctttttttttagttcaatctataaaaatctaatagtatttatttttggaaaaccctttcttttctgttatactttaggttattaactttatatcttcatagcctgaaggatttcatttatcataaataatgataagccttattttgggcaacagagagaaattcattaatgacaatatagcaataatagttaacatttattgagcacttactgtgtacccatactgtactaaatccttttcttgaattgttgtttttgtgtattgttttatttaacaggtagttactatttttatttccatttacagatgagggaactaatgattggagagtctcatttagttgctcaagtttatagtataagtgacaaagctgggatttgaatgcaggctttttgactctagagccagtttaggagaaatggatattctgatgtaactttttcctagttttgaactttcttaggaccatgaccaaatcaaagttcttctattacaaaaattaattttcatagctagaatcagatatttttatagcaaaatatatttctgctgcaatactctgagctctctttagtaatgaactcaagtttatattttcttacgctttccttttacctatggttttaacaatattttacctgtggtggtaatttttttaaaaatgtgaactatctcaacagtaattttatattaaattatttttctgtaaccgtcagccctaattaattttagcatctgttttcactccctgaattttagtaatctgttgttgagataattatagcaaactacctaatctaaggatgactaattttctagtaaaccagaaaaggtgtacttcttaggtctttgctcaaatgtcaccttatctaagaagcttacagtgatccaatatctacaatagcaccctactaccttgtgccaaatcacttcgttatttactcgatttactttatttttctcttaaattgtatgtgtttattgtttctttctccaataaaagataaagaaaaatgggcatttttatggagaatttggagttgagttttttcttgctctaaatatagttggacctccatatctgtgggttccacatctatagatttaaccaataatgaattgaagatatttgagaaaaaaagaatggatatgtctgtactgaatatgtacagacttttttcttgttatttcctaaaccatacactataacaactatttatatagtatttacattgtattaggaattataagtaatctagagatgatttaaagtatacaagaaaatgtacataggttatatgcaaacactacatcattttatataagggccttgaacatccctgaattttgctatctgtggatagggtgggcagtgggtcatgaaaccaatcactcacagatactgagggatgactataaattttctgtacctctgcttatatatgctatataatactagtggcatcttgagcagtatattttagactcttttacaggtggtacaatttgtaaaaaaatggatttatgcaactttattttgacaaattattggcagagcagagttaggacccagggaaaacttttttactgtgcttttcattgtatatctttttcttagtccctctttcgctctcgagattatttttaaataaaagtatagcaatatgcatattattatcaatacattgttatttatctaaaggaaacttaaaatataactaaaatattctctaagttttgattttttttcttgtcactattaatctttagtgttccttcaaaatacttcatatgaaagacccacttgtttacaatgtcttggtactttagaaaagcctaagtaacatgtgctacttgggaaggtcagcactattattgcccttcatgtttctgatttgttaggattataccaaatgtaatattattttaggaaatcctgagtgaatgaatgaattgaatgaataaaattcctaggttatatattattcttttcaattttttcctcttaaatttggagttaggattatggaaaaaaatgccatatgctatgcatcagggtctaatctcttgatctctgttttattctctcttcatgtaaattgtccctttccttgactttttccatagatcaaatccagcagggatcaagctttggctgaacrttgtcttsctgcactaaccgaatgtgctgctagcggagatggaaatatcctggctcttgcagtggatgcatctcgggcaaggtgaagatatataagtttggaggtttccaaagactaaaagttgaccagtttagcttttcagagtatacttaaataamaggttgatcctgtaaaccatgtgagcccaaaagaaaataatggcatccatcgtaaatttaattcttatcattttaaaatttctgtatttaaaacattcatgttttgagtgaactgtattaataattgtgtattttactgtggctgaggaattttgaaactattgaaatgaatccatttcactgattcgcaggttgaaatgtgttggactctcaagtatatcaccaggtttatgcctattaccttggtattttaccagttaaaatggctgtggggtggggaggggaacattaatctgagaatttataggaaaaacttgtcatcccattgcttttgaattagttttaaccatgaagcaaccggaagagcaaccaacttccccacacccccctcccagtccttcccttgttattggagccatgtgttcctttaggagtagaatacttattaattgttactagtcttttatctccttttgacattttggtctactgcatttgattttctactgtaatataattgctcttactaagttcactagagacctcctctttgtctgatattgtgaataatttttagtccttatcttgaattctctacagtatttaacattattgaccacctcttccttcttgagacgttttgcctttgtaacccttaacatgctcctttgtctcctaacttttgtcatcctgcatttaaaaaaggctgagtgaaaaacagaatctaatctcatgttatatctgcttcagtgttcccatagacacgatatttggcaaggtaaagttttttgtacttactacctaataggatttttgtgagaagacattaaatcattaaaaatagttcctggaacagaatatggcacttaatgtgttaatttttattatttttctatttgttgttatttaaaaattatctcattatatgtatcatatataaataaatttattatattaagaaccagaaggagtctgaaatattacccttcttgcaagctaacaagttatcctgtatagtggggtgttggttgatgatatgagatccctggatcagaacctaatgacagtttgttactacaatattaatagccataacatcagcaggttttgggctagttcctttgatgcccaattgatgtgagtgatgtgaaaaggactgctagatgatacctcatgtacagtgcattgggttacattcaaggagaggaagcctgagcttagggattcggaatcttttgtaatgggtaataagcatgtcctccatttttctagaggaagacattattatattggacagaaagcaaacctactctttgctctggaggtagccaatatttctgtcttctaaggcgattcactatacagacatctttgaaaagatagtccagaataaagaggtgtcagtgctttgctccacaggatgtgcagaaaagcaagtgacccatggaaaattttctcccaatatatggcagtatcattaaatgattacttttgcttttaagtgtttatttcttaatataatgaagttttaaaaaaatatgttgctttaactggttaaggtatagtataacttgtatgtactgtttttttctactactaatttcattaaaaaaattagatgacttttattaaagtcctttgatggttgcccattccttttatattcaaacctaatcttccgatagtctgcaagatgtgctagatgtgactcttgcccatctctctgacctcatcttataccactttcctcactatgccgtgttcctaatgcccttctttctatttttagaacataaaacatattttcctacatctcagagcctttgcttttagtgcttcctttttcaaacactcttactgttttatgttcccttgggatccccctttttataatttatatcttagttcaaaagtcatatcttcacatcttcaataactttaaaatggttcttccagacagcccattccatctttgcgtggtttagtgtctttgtagtacttattaccttatgaaattgtcttactagtttatttatttagttatttatcatctgcatcctctgactagatgttacagatgttaatgtctataagaacaagtactttttctttggtctcatttattactgtatcgctatagtagatatagagatatagtaatatctggcacatattaggcacacagctaatgttggatgagttagtgaacaaatggatggaatatgctaaaagatttacttcttatcaaaaaatatttatgggagtgttgctgtttatccatttgtgttaagtggtgaattattcagcaaccttcaggtacttgtctatatatataattattaggtcattcagtcatttcttggttgacaaatgttgaaaagagaattggatgcataaaggcatccagaataaatttttcttaagtawtttcagaagagatgctttcataatgcattaaaaaattcttattttacatttttacagtcatttacttatgtaataaaatgtttaattatattgaatattatggtaaacagrtatctttatcacaaaataatgaagttaatggaaccaccatttcatgtttcagatgtacagtgggagaaatcacagatgccctgaaaaaggtatttggtgaacataaagcgaatgatcgaatggtgagtggagcatatcgccaggaatttggagaaagtaaagagataacatctgctatcaagaggtaatatgtaaggtttcttaggccagaatttcatcttttctgttagcacaatccccttgaatctastgggagcttaatttccttacatacaactgagaaaatttttgaattttataataataaatagtaaattaaatattaattatatagactatataacatataatagagtatataatttattcattacatataatatataattagaaatatatcatacatgatacatattatatatctatactatcattttaataggtacatgataatatttaataataaatatcaaatattgaaactaatattagttttcatataattaatactattttgaactttcaccatagtccccttcaggagtttctcatgtcaaacagatgtttaactaacaatgatattgcttcatatcctccaggtatttatatttcaatctgcttactatggtagagtttcatattttttgaagttgtttacatttttcattgcttgaataattataaaatcttaattttcataattgaaagtaaacatttagttggcatctatgcatacattacaatcagtatttattgaactgataataacttacatttatttccacagcatgacttggaaatatatattaatgtgatcatatttctcaagtgtaagaactagctttttgatgattggtctttccaacctctgtaacaagcttccaattaaaaactgaatttccatacttgtacactagataaatatcaaaacagccaaggtgaaagtcatcaaaatggaacttttttcttttaacaaagataagtgcttttttgtgttggaagtaaatttgtcagtggagcaagcaagcattttgatttatatagcatgataagaaaccatattgctgttaccttgggagagttcacacttatgaagggtagatgagatatggacaattcaaagcagccagtctatcacatatatgtataaatgaccatgaagtcactttttagtttatatttcaatctttctgcatgttgtactctgtaccctggctcacgaaggtgggaggttgtcattttttgtcttagttcaccgtgatgttctcagtgttatgtgcttacagtctgtgccatctttcagactttcctctaagggggaaatggctttaatggagctctcaatgtaaaatagatgcattaacaaaatatggacgagagtagggagatcatcacaaagaatagctaatggatgctgggcttaatacctaggtgatggggtgatctatgcagctgtttaccatggcacgtgtttaactatgtaacaagcctgcayattaacccctgaatgtaaaataaaaattggaaaaaaaaaacaacccaaaatacaagtaaacaaattaggtgcttttaaataaacttgaaagatttgctgtgaataaattagtttttatatcttccctttggaaaattagtatctaactactgatatatttttaaatgtttttcagggttcataaattcatggaacgtgaaggtcgcagacctcgtcttcttgtagcaaawatgrgacaagatkgcmrtgacagagragcaaaagktattgctacaggatttgctgatcttggttttgatgtggacatagrccctcttttccaggtactaaaaactgttggggggaatttcaaaagtatttactagtcacttacatttagaaaatgtagtaaaatgatgacagacattgagcaaattaatacatctcctggtaactggtatgtagccactgacttggcaaatgcctttctctccattcctgcccataaggcccaccagaagcaatttgccttcagctggcaaggccagcaatatacctttactgtcctactgcaggggtttattaactctctggctttgtcataatcttattcggagagaccttgatcacttttcacttctgcaagatatcacactggtccattaattgatgacattatactgattaaatccagtgagcaagaagtagcaaacatactggacttattggtgagacagttgcatgccagaggatgggaaataaatctgactaaaattcagggaccttctccctcagtaaggggtccagtggtgtgggacctgttgagatattccttctaaggataatcttagaaggataaattaatgaatttgtctcctactaaaaccaagaaagaggaacaatgcctagtgggcctatttggatttttggaagcaacacattcctcatttggaatgtgttactctgtgttactctggcctatttatcgagtgacccaaaagactgccagttttgagtggggtccagaataggagaaggctctgcaacaggtccaggctgctgtgcaagctactctgccacttgggccatatgacccagcagatccaatggtgcttgaggtgtcagtggcagatagcaatgatgtttggagcctttggcaggcccccataggtgagtcacagcagaggcctctargattttggaggaaggscctgccatcttctgcagataactactctccttttgagagacagctcttggcctgttactggactttggtggaaactgaatgtttgactatgggtcatcaagtcaccaygcgaccagaactgcctatcrtgaactgggtgctttctgacccatctaactataaagtgggtcttgcacagcagcattccatcatcaaatggaagtggtatatatgtggtccagcttgagcaggtcctgaaggcacaagtaagttacatgagaaagtagctcaaatgcccatggtctccactcctgccaccctgccttctctccctcagcctttatatatatatatgtaagggggagtttattaagtgttaactcacatgatcacaaggtcccacaataggtcttctgcaggctgaggagcaaggagagccagtccgagttcccaaactgaagtatttggagtccaatgttcaagggcaggaagcatccaccacgggagaaagatgtaggcttggaggttagatcagtctctctattcacatttttttgcctgcttatattctagccacgcctggcagctgattagatggtgcccacccagattaagggtgggtctagccctttcctagcccactgattcaaatgttaatctcctttgacaacaccctcacagacacactcagggtcaatactttgtatccttcaaccaagttgacatggagtattaaccataacacatatagtccaattaattatgatagaaataaaaataaaatataattaatctttcagacttttaaaagtgtcagttcagaactaaaactgattatgcctctggaactatgaagattactttcaaagatcttattgtactctttattgagatttgactaatattttgtgggaaagatagcccacatgggattggtgaaaagtgttttgaaaaagaaatcaaatagcaatataaactcaattcataagtaaggttattttcgtttatttttgttgtctttttttaactctctactaatatgttacttagtcacagaatattagacttagacaggaaaatagtttgcaggagataaattacactgacattttccatagaatgataatacaaaaaaatttgactagaaagtacattgtaataattttatatgaaaagccttctctactacatatgtattgatcatctaccagatgctaggctctgagttgagtaggatacaattttgtcctcgaggttacaatctcctaacaaagagagatttacttacttgtaattacatcgtatgaaatttactatgtaaattattactatttcgtacatagtatgaaaattactataactaaattactataactttatactatactataactatagtataaaattactataactaaaatatggacaaagagggcacctcacttgttacaagaaacccagaaacttatatttgttgatccttaaaacttatgtttgtttcagaagcacagtgccattcactttctagtaaaatcactctctgaagtggatggaggagagctgcaactagattcaagcagtacggtgaagaaaaacaatgagaaacaacgaagaccttaactagggcaatgtcagggtctcaagagaaaccaaatctcagctaggattttgaagaaaatttaatggagggactacttacagatatgtaggcaggattgctagaaccactaaggaataatgaggcctccaggaattaaatttttaagaatttcaaaagccagttgtttttcatggtgtgaaatggtgtctcatttgtttaagttccttgtagattctagagagtagaccttttactattgcctaaaaccaaaagtgataagtactaaaaacttatcactccctatatttatatattttattatctgctttttaggttatttccatctattttttctatatggtagtgatactgtataattgtgtggctattgtgtgtctttttttctgctttgcatttagtaatgtcatgttaatagggtgaaattggctatggttggaatattcacaacataaaaatcagcaaacactaaaaattagggattgagttattgttttcagaaaatttgatgaaaaatgtaaataatcagaacaaagttctctgagggaaataatgtaacgatgaatattaaatttaaaagtttctgatatctgtaggcattacattaggaagaccccccaacatttgaggaaacattcttttagtattcaaaaaaatattattttttgtttgtttttttaacttttattttaagttcaggggtacatgtgtagatttgttatataggtaaacttgtgttgttaagcctagtacccattagttgtttttctgacctccctcctcctgctcctctaccctctgataggccccagtgtgtgttgtttccctctttgccttgtttgtgtccatgtgttctcataatttagctcccaattataagaaagaacatgtggtatttggttttctgttcctgtattagtttgctaagggtaatggcttccagcttcatccatgttcctgcaaaggacacgatctcattctttttttctggctgcatagtattctttagtgtgtgtgtatcacattttctttatccagtctatcactgatgggcatttaggttgattccatgtctttgctgtggtgaatagtgctacaatgaacatacatgtgaatgtgtatttttttttttttttttgaaacagagtctcgctctttcatccatgctggagtgcagtggtatgatcttggctcactacaacctccacctcctgggttcaagtgagtcttctgcctcagccatatgagtatctggtactacaggcacgtgccaccatacctggccaatttttgtatttttagtagagatgggtttcaccatgttggccaggctggtctcgaactcatgacctcaagtgatccacccgcctctgcctcccaaagtgctagaattacaggcatgaaccaccacgcccagctgcaagcatgtttttataatagaaagatttctgttcatttgggtatatgtacggtaatgggattgctgggttgggaggtatttctgttttgaggtctgtgcggaatcaccacactgtcgtctacaatggttgaactaatttacactctcaccaacactgtataaacgttccattttctccacaaccttgctagcatctgttattttttgactttttaataatagccattctgactggtgtgaaatggtgtctcattggggtttttatttgcatttctctaacaatcagtgatttggagctttttaaaaatacgattgttggccacatgtatgtcttttttggaaagtgtctgttcatgtcttttgcctgctttttaatgtttttttgtaaatttgtttaagttttttatagatgcaggtattagacctttgtcagattcacagtttgcaaaagttttctcccattctgtaggttatctgtttactgtgttgatagtatccttttcagtgcagatgctttttagtttaattatatctcatttgtcaatttttgcttttgttgtaattgcttttggcatcttcatcatgaagtctttgcccattagtatgttctgaatggtattgcctagattgtcttccagggtttttatagtcattatctagtaataaacaatgatttatctttactttctgactgtttagactcctcgtgaagtggcccagcaggctgtggatgcggatgtgcatgctgwgggcrtaagcaccctcgctgctggtcrtaaaaccctagttcctgaackcatcaaagaacttaactcccttggayggccagatattcttgtcatgtgtggasgggtgataccacctcaggtattttttatctctatttttctagtactgtgatgggaatcttgagtaatgatagcttatttgtggttctaaagataaacttgtagatttaggaacatattatttcctggtgatttcactaaataaattctacaaggtctaaaagtggacagtgttgttttgcattcaagttatattgcaatttattatgtataatttaacttaacactttacaaagcttcaatgagagaactacctccttgcaaaccagtaacctatgctagatgtttaccttcattctcaataaacagttatggagaaggaacaggataaaagtaataaaactcataagtggagtagagaacagtggtagtaaatacacagtgaatatatcaaaacctagccagagatatagtgagtactccttgtcctggggggtggaatgagtcctttagtttgcttgcttctatttagaaggagctaccttgtgcttttcctccaggatggtcccatccctaaatgttatcttacctcagagctatatcatttacatggtcctataaaaccctttattatttaagctaatctgattagggcttggtatttcgggagccaaaaatatcctattgcagacataaatggaatcagcttgtcttgaaaattataggctgaatggggaggaggtgaatacatgaacaaaactgtgagtcctcttagtagaggagaaacagatgttacctacaatgatatcagttaatttattaatgaggtagggagacaccttccacatatgacattcctggccagttaaaatagttatttaaaatacaaataggttctgtttccaatccagttctcaattatatcaagattttcttttttactgagaatggaaaaaatgtcaagttagaagaactgtatatgaagctgtcgtaagtaaatgactcatagatgctagctgcaaaggccccatcactatagcaggaatccatcagtaaaatgtgaccttgtttccagctctacagtttttttttcctccattaatactcagaatatagaatagtacattcatatactacttgtgaaaggagaaaattcatatgaataaagttgtgagattcgtaataaagtggggctactgaacaaactacatatttattttctttccaacaacacattatttaatgtgatataatcaacacaaaattctttttgttaatatgcttgcctattatattcataaaataggtcattatttgagaaaataaagggtagttattctttattgcagtctgtctacagaacgcttctatcagcgttgcagttttagagtctgtgatacctaggcatgatattaaaatgtaaggaccaaaataattagccagtagaaaacatttgaattggaattcatgttgagaaaaaaaaaatgcctgttatataagtgagctgacattttcaagaattatatttcaaataagttgtattaattctctggatatttaaattacttagaacatctttaggtgtttgccatgtgatttttcccatgaatttaacaactaaggataaggaccattttctgtgttatacttttgtgtgaatatgggtattatataattatagcagttaacacccttgtattttctcactatttgtttgcagtgaatatgtaaaatgttgctattattcaattaaaggtcacttagttttaaattagaaggcactaatatctagtggctaatcaaacagatacagcttctgccatgtggagcttaacagtttctgcagtctgattaaatgaataaacgtggtctctcctcatcagtatgttactacgatcagtattttctaactctcttagcagcagtcgcctccaagttttttcagcaagttgagtagactcacaatgcctgcttccatcatgaagcaggcactgtgctatccctggcccagctaagtggaggacattcaaacatatatttttatttggaaataatttcaaactaacagataagttgcaaaaataaaaatagtacaaaaaatatctgtatacaaccccctcacaaaggtatattttacaaggcttatgtaagaaagagttagataagtcacatacccttttttcagttgcaacatcttgcagttctcttccagttgaatcctccattctaaatccataactcagatgtcaggacaaatggtacatgggatttttaggaaggagagaagtacaagacctattaatctgacatctccaatttagagatgattattattacatgtttcattcagttcccttatgagctcttaaactctgtatcatctactcaagaacaatgacatgttttgagcacttttatgtgtcaagtactggggaaacagattggacatgatctctactctcagaatttcacagactagaaggagacaagttcaatgagatgtgttaagttctgttgcaatattatagtattataagaatattacaagtatataatagagacagaaaagtagtagttggggagtaattagcatgaccatataatttatcacttgagaatagaaatgggtgctcttaaaaagggtgctgcaacaataaacaaaaatcagactgtcctgtcatatatgatcaccctactggataatgatcaggttcttgtagcacatcctaacatcaatcgatattgcagctacaaatgttcagatgttataacagcctaaatcctgcagtattatttgtgcccttgatatcttttcactcatactttgactgttaaaataaactaaaaaggccaggcacggtggctcatgcctgtaatcccagcactttgggaggccaaggtgggcggatcacgaggtcaggagattgagaccatcctggctaacgtggtgaaaccctgtgtctactaaaaatacaaaaaattagccgggcatggtggcgggcgcctgtagycacagctacttggraggctgaggcaggagaatggcgtgaacccgggaggcggagcttgcagtgagccgagatagcgccactgcactccagtctgggcaacagagcgagactccatctcaaaaataaataaataaacaaaacaaataaataaactaaaaaaaatcaacagcaacagagaatgaaaaaaaaaatgggcttattttcatttatagaaaatctatcagttgtccaaattcaaagtgccatcattcactaactgcagacaaaatacctaggagaaaatagttttttaggctcaaacttatcacatcatactaaatttaacacacataatgacaactagtgaaaatttaggtgagagaaaattatggcttaaggctcagaagttctcagtcaggatatccagcttcctaccacaagcaacacatagaggcatttagaaaatgggcggagtgttttgttttttaaataacttgggctgggaggctggtgctgatgactattagtagcactcccaatcaaggaagaattttttagccccaaatgccagtagtataccagttgagaaggttttgggtaattgagtgacaaagaagaaaggatagggttttatttccgtgaaaatggaaatagtggctcttattaattaaacacattctttcaacaggattatgaatttctgtttgaagttggtgtttccaatgtatttggtcctgggactcgaattccaaaggctgccgttcaggtgcttgatgatattgagaagtgtttggaaaagaagcagcaatctgtataatatcctctttttgttttagcttttgtctaraatattattttagttatgatcaaagaagagagtaaagctatgtcttcaatttaatttcaatacctgatttgtactttmcttgaaagctttactttaaaataccttacttataggcctggtgtcatgctataagtatgtacatacagtttcacttcaaaaataaaaaaaaaatccctaaaaactctctatactctctataacaatactttatcaagaactctggacaatggtattatttttaaaaatcatggtgatgtatttattagaatgtttcttataaatctstttactttttatattaagaattaaactgtacctaaaaaaactctgactattcccatttstcagtttagcattacattgtcttgagcaccagaaaataaaatccatatattaatwaaaacctatcttgaaaaactagtggagtgtatttacgtggcaaaagagattttgggaggagtcctcagccaaattctaccagaatcaccttaataaaagaagtattaaaatcaagcacagcaggttggaatatggggaatttgacagtatrtttcttcaagtctgagtttactttcttcctgatcatgaccatctgaccttgttatttctgggcttggctcaagaccaaggagagtggatgttgatgaacattcctttaaataaaagtgcttaggttgtagttatggctttgtctagaatggtgatgtcaactgtgagtgtaggtctgtgatatagaaagaattcaactttccagatctagaaagatgctaccttgcatagatttgctccttaaacataaattgcaaaaataaaaatatcacagagaacacctgtactttgcttactgaaagatttgctcactaaagaaggaaagttgccatttacctgtttaacaaatctgcacatcctgcacatgttccccagaatgtaaaataaaaaaagtttaaataaaaaaggaaagttgtcctttattgttaacatgatccattacatgaatataacataaataattatcttttttaataaatttctattgtattagatcagagagcagtcttttggaaagtattatagatacattactgtagaatttacaaactcattgtaatacaatgtatttaattttcagaatatgattatctgaatggtattgtcatgattattgttcccattttcagatgaacactgacttcaagtccaatgatatattcactatgccattttattgacttttccttgtaaagcaatgcacactaatttagtaagtatttggtttctgtgatgtgttcagttgcrtgctgggtgacatgtgaaataaactcatccttgaggaatttacagctcttgacagtatcttttgagtagactactttgggaggaagaatagcagccacttgctaccaaatttcacatccattgtgtgtgtgtgtgtgtgtgtgtgtgtgtgtttgtgtgtgtgtgtttacccgaagtcagaagtactggctccaataaccttactattgaaaacctattttctgaaatatccagtggcataactcatagaaatgaaatctggcctgactctaagattaaattttctcattattattaaatcgagaaagtgttaaaacttaaacactttagtgttatttagattccaaaagattccaaaagaaatttcatccgacctttattactatccttatttttggatgaaaacttgtatgcccaacaatgagctgacttttggaaatgatcaggaaaataaccaagtatattaaaaaagtggatagatattttatacagataagctatccgatattcaccaaatagtacaagaaaataattaatggatcaggaagacaactactttcctcatttcctttcatcgaaaacatctgattcaaaatagaagattccagcacaaccaaaacatactgcacaaagcaatttaacttactgatatgtgttgtttcacaggtgagcacttcatcaatctaatagtgcccaatcttagttacagttatttcatctttgataagattatatttatgatgcatgatgccagtgaggcaactgacagagataggaagaagattttgcattcatagccagtgtgatctagatatctttgctttgtttataggctaatgaagaatcaagagttcatctgtgagaaacacaccatatacacatatccacacctgaactgaagaaatagggaactcaggcattaactaacttaaactcttaccaatcagggttcagagaagaagaatcagtaggagacgtgtgtatgagtgtgtgtgtgtgtgtgtgtgtgtgtgtgtgtgtgtgtgtttatgagccggctggaaccccacaggcataagctgaagcttgttttcttcagggaaccagtcaggaaggaagataatagacggaagggagagcaattgttgattcaatgactggagtctgggctcaggaaaggttcaaaccctttttattatttttattttgtatttttaaattatactttaagttctaggatgcatgtgcaggacatgcaggttttgttacatagatatacatgtggcatggcggtttgctgcacccatcaacccatcatctaagttttttaagccctgcatgcattaggtatttgtcctgatgttctcccttgccttgctccccaactccccaacaggccactgtatgtgatgttcccctccctgtgtccacgtgttcaactctcacttaggagtgagaacatgcggtgtttggtttgctgttcctgtgttagtttgctgagaatgatggtttccagcttcatccatgtccctgcaaaggacatgaactcattctttattatggctgcatagtattccatggtgtatgtgtgccacattttatttatctagtgagcttttatctgattaagtcagatggcttgctcaggataatctctcttttgattaaagccaattgtttaggggctttaattatatctacaaaatttctttccagcattattcagagattagtgtttgatcaactgggggaatgtgtttgtgtgtgtgctacagaaggattgtctcctttccatcctccaatccacaaaagagagggaatatcttatccgttgtatctcatcctaactggagatataatagaaagggaattttggagactgtagttcattctagctaaattgacacattacacattacaaaatcgtcatatcccctcactttatgtataggcaactgatgcagagaaaggaagatttaaccaacatgacatgatatttatagcatgtctagagcctggtttgctggctccagactcagcagttttcatattcatatctgaggaaaaccacattatcaagatttataactacccatatttgctattcattattctgcagaaaggtccaaaatttagagtcagtacatatatagttggtgacaaaaaatttgaagaagaatcacttttgtattgaatcaaacatttgcatcaaaggtatctgaggatgtactttctcaaatccagtcttaaaaaaattattctcagagcttcttctgttattaatgaatatgtcaactgggattaataaatatgtaagacttttccaagactgtaacaactaacagtaattgttatacaaagcaggcactacttttcctttactgtaaagactgctctgattatagacaccattgactcttcttcccaaatgagtcaggagtaaatagactcaagtggaacttctggctataatagatggagttccataactacagggaaggcaaacaaagtatttctagcaatattataagtaggctagtggcatcacatcatatctatgtgcagtgttctatcaaaaagctaatctggagaagggaagttcatttgttgagccttggactctttcaaagtcttgcacaaagtgttgttgaaaaacatatagaaaatatatataaaatatagaaaaaaagaactccagactggataatccagaaaatatgtttccaattaatagtcttctgataatagagcgctagttaagtcattcaaaaattctgtatcatatgtttcctaagtaaaagtgaggaggctgttcgcctaacaatagtgacatatttttcatttggatactgtgtttctcaactctagaagttacatttgggattttttttttgtagctttctatttctcttatttgtcacatttttctttacatttttgaacatatttgtaatatattagctatgctaaggtttttgcatgacaattctattatttctgtcattttggagtatgcattcattttttttctttctggttgtgggttatgttgcttttttgtagacccggtaattgatcattagatgacatattgtaagttttgtgttagtttgctgtgttagtccattttcacatggctagaaagaactacctgagactgggtaatttataaagagaagaggtttaattgacttacagttctgcatagctagggaggcctcaggaagcttacagtcatggcagaaagtgaagggaaagcaaggcatgtcttccatggcagcagggcagagagaaagagaggaagtgccacatttttaaaccatcggatctcgtgagaactcattccctatcatgagtacagcatgggggaaatcacccccaagatccagtcaccttccagcaggtcccgccaataagtggggattacaattcaagatgagatttgagtggggacacagtgccaaaccatatcagttgcattccttcaaagagtattgaactatgtcctcgcagaaagttaaactacttgcagttcatttttattttttccatgcttgcttttaagctctgttagtctgggtcaagaacagcctttacagtagggctaatttagtgcctttctttttcttttctttttctttttttttttttttttttttttgagatagggtctcactctgttgcccaggctggagtgcagtggcgtgatcttggctcactgcaacctccacctcccgggttcaagcaattctcttgcctcagcctccctagtagctgggattacaggtatgtgccaccacacccagctaatttttaatattttttgtagagacgggggtttcatcatgttggccaggctggtctcgaactcctgatcttgttgtcctagtgccatttttaaagttttgatgtcgcatgatccagtaattccatttctgggtatatactcaaaagaagttaaagcaggactcaaacagatttatacactaattgctatgaactgaatgtttgtgactacccaaacttttattttgaagtgcttacccctagtgtaatggtatttggaggtaggatctttgggaggtaattaggtttggatgccgtcatgaggatgggatcctcatgatggaattagtgcccttgtaagaagagaccagagttttcctggtcaggtgaagatacagtacaaaggcagccatcttcaagagaatccttaccaggagctgaactggttagcatctcgatcttctacttcccagcctccagaactgcctgttctggaataacagaaataaatgcctgttgtttaagccatgcagttgatggtaatttgttaacaaagacacaaatgttcatagcacatagcagcattactcataataaccaaaaggtagaaacaacccaagtgtccatgataaaatgtggtatatacttacaatgaatattattcagccttaacaaggaagaaaatttgacacatgctacaatatgctcatgcgtccctgaagacattttgctaaacgaaatgagccagtttaaaaaaaaaaaaaaaaaaaaacaagtactgtatgattccaattgtatgaggtttctatagttgccaaattcacagagaaaaaagtagaatggtggtcccctggagctgggaggggaggggaaaaggggaagttattctttagtggctaccgagtttcagttttgcaagagaaaaagagttctggagatggatgtcagtgatggttgcaggtcaatgggaatgcacttaagtccacagaactctacactgaaatatggttaatatgattaattgtatgttatataaatattttatcaaaataaaaacaatatatttaggacagtggttggcacataatacaggctttgtaaatattagttattatattgttattattgtattagtgttcctattattattattttatagaaataatgaatgttaaggtgtgaaaccaagcagtaggcggagaacagattatttagaggcttatgctgttaagaaatttggattgttatcctgaagattatagagagccatataagagttttaaccagagaaataatctgattgtttcagcacagcagatagaatatggctttttatgtgggcaatgacggagaaaagaattaaaaggctgttatagtgatataatagagaattcaaagtatctaagcttatctgcttaggtgctgatgagagacgtcagaaatggagaggatatgattttattttggaagattggcttgacagaaactagattttatcttttttaaaaaagtctctagatccttaggtattgctgtgtggaatctgctatatcccctcacccattttggttgttttctgtggacctcttttgatgtgcagtgatttcatgactgaatacactggtataatgtcaaaatcaggaaaaggtaaaatgatgggaatttttttctcagtgataatttgtgtccatactagagctctctgagcttttccggcaccagaagagcaccagaatgatgtgtttagggggcactgaagacatgaaaattctcttcctgtaacgtaatgaaaatttaactattgtataaatattttaagtacaggaagtgaagcagagctttggagaggtgtcctttctgagcaaaacctgcgtggaactggagatttaaattaaagtaacagaaaacaataaaaaaatttggatgattactccttcctttgattttcatctcacagaatgggaattcatataatggggggtgggtggtgaggggagaagcttttaaaaagctctaggtctgtctatttgctaacaaaattatgccacatgtcactgccaccctccattctcatccttaaactcctctgcacttcatactagtcaaaaacctattcttaaaaatgaatctaataaaaccatatatgttatggtgaaaatgtctattaatgcaaaatatatttattctaccagaaatatttttattttaactgaagaaaaaacttgccaaagtgattaatatctaaatatacttattgctgcttggtagacac

SEQ ID NO: 94978 - DNA, 73314 bp, Homo sapiens
  misc_feature (1)...(73314): n = A,T,C or G
aaaaattacccacctgttactgccagatgctgccctttgatataaggaggcagatgagaatcaggaagtacaagtgatactgatgtagaccaataacaatgagctattacaagccacaaaacaaagcatctaagtaacacatttggaaattatttctatggttgactaaaaaaacttactttagaacaatactttatagagggcaatttaataatacctactattaaaagagtaattttaaaaataaaaattggccaggttttgtggctcatgcatgtaatcccaacactttgggagggtgaggtgggcggatcactcaaggccaggagttccagatcagcctggccaacaacatgccaaaaccccgtccctactaaaaatacaaaaaataaaataaaataaagatagaaatttctggaccaggtgctattgctcatgcctgtaatgtcagcactttgggaggctaagttgggaggatttcttgagcccaggagttcgaggctagcctgggcgacatggcgaaatcccatctccacaaaaactacaaaaaaatcagccaggcatggtggctcatgcttgcaatcccagcactttgggaggccaacgcgggtggatcacttgagctcaggagttcaagaccagcctgggcaacatggcgaaaccctgtctctaccaaaaatacaaaaaattagccaggcatggaggtgcgtgcctgtagtcccagctacttggaagactgaggcaggaggatcatctgagcccggatgtcgatcctgtggtgagccgtgatcataccactgcactctagaccaggcaatagagagagaccctgtctcaaaaataataataaagtaataataatatgagacagagttttgctctgatgtccaggttggactgccgtgacatgaccatggctcactgcagcttcaacttcctgggcttaagtgatcctcccgccttagcctcccgagtagctgggactacaggtgcacactgccacgcctggctattttttactttgtgtagagactgggtcttgctttgttccccaggctggtcctgaactcctaagctaagttatcctccagcctcttcctcccaaagtgttgggattataggcatgagctaccacacccagcctgaatttccacttttaacacccactaggggtgtgactttgggcaagttacctgtcctttctgaaagtcaatttcttcatctgtaatatggaaataacaatattatagctacatggggtcataaaaataattaaataggaggttagtaaaagaatcaagagaggtaaagcacccagtatagtacattgtagtggctccaaaatgttagttcccttccctttttcttttcttttcttttttttttttttttttgagatggagtctctcgctctgtcgcccaggctgccaggctggagtgtaatggtatgatctcagctcgctgcaacctctgcctcccgggttcaagcaattctcctgcctcagcctcccgagtagctgggactataggcacatgcagccatgcccggttaattttttgtattttagtagagacggggtttcactgtgttgcccaggctggtcacgaactcctgggctcaggcaatctgcccacctcagcctcccaaagtggtgggattacaggcgtgagccaccacacccggcctccttttttcttccaaatataaaatgatagctttactctcaacactttaataaggtacaataagatacaagattcaactggccaaaaataaaaataaagattcaacttgctgggttcagaaagttatcatggattatcagtgaactgctttacaaatttttaaaactaaaaatcagcatcaaaaaatatatagatcacataccatgctcttatccttaaaataaagtagatcataaagttcccttatgatcatcaatctctgtttgcttcagacaagaaaacatgcaacaaggattgaaaataaaagagagccgataacagtaaaaccattctgaaaaagtgtcttgcttcaaacagagttaaggtcaattgaaatgtcttaagtatatgttaagatttcaaggaattaaaaatctttgaaatacataaccacatcagcatcaccatagaggtagttaatgaggccaaggaggctttctacctacctaccatattatctttctcctgatcctgcttcttcaggtaacttaatactgacattatgtctttctccaktttacattgctttttmtttaagtcctcattactttttgccagtatcygtgaagtatcacgatacttaatcctagagagttctgtgacttccaacctggcctcccaaagggaggcattggccttggctctgtccaccacagattcatctgtttttattaacttcctgcatgggaagaggatattgacagtatatgactatttatacaactctaatatgcagatagtatataactctattatattactattaaatttttctctttttttatttgttttgcttggcattgcctggcacacatgatcaaatattgttggaagaataagttaataagaaatacatattcacatttgaaaaaagaaaaaaaaagaaatacatattcacttgtattcacataagataattaagtaagtgcctcttcctggaggaggggagtcctggagcataactcgaaaagactggtaaaacaaagggaaaagacaggataagccaaactcatttcagaaagctttcatatcttttttttttctttttgaaactgggcctggctgtgtcaccgggctggagtgcagtagcacgatctcggctccccagaacctctgcctcttgggctcaagccatccacccacctcagcctcccaagtggctgggactacaggttcatgcaactatgcccagctaatttttgtactttttgtagaaatgagtttttgccatgttgcccaggctggtcttgaactcctgggctcaagtgatcctcctacctcagcctccgaaagtgctgagattacaggtgtgagccactgcgcttgggcagtttttataccttttcatttacttatttgattctcccatatttattttttttttaatagagatggggtcccactatgttgcctatgctggtctccaacttctgggctcaagtatcctcccaccttggcctctcaacgtgctgagattacaggtgtgaaccagtgccctagcctgattctcctgtagttaaactatcttttctattcctactcactcagtgctggactttggttctctccactgcaaacccattatctctgttcagtttctgcatgatgatacccattggtagtataactgtgatctcccacccactttaccctccacttttgagtgtgttttttttttttctgggggagggacggagtctcactctttcacccaggctgaagagcagtggcgtgatctcggctcactgcaagctccgcctcccaggttcatgccattctcctgcctcagcctcccgagtagctgggactacaggagcccgccaccaggcccggctaattttttgtattttcagtagagacggggtttcaccgtgttagccaggatggtgtttttgttttgttttgttttgggctaggtcttggacaaaaagtcaagtcactagggcaaatacgttaaatagtttatcagctggtgccacagttcaccggactttttttttttttttgaaacaagatcttgctctgtcatccaggctgtagtgcagtagcaccatcacagctcactgcagcctcaacctcccaggcccaaacgatcctccacctcagcctcctaagtaactgtgactacaggcatgagttagcatgcccaactaatttttaataaaaatttttgtagagacagggtcttcctatgttgttcaggctggtcttgaactcctgggctcaagtgatcttcccctgctcagcctcccaaagtgctgggcatgagccacgatgccccacccaccgggctttaaggatgcctgagaaaccataatcatttatatagaggtggagaggaaaaaggatggattcaaagattaaagtggtaaaggaagagatttttctaaatatttattgtataagcattaacaaaacactcccccttatatatggtaggtaccatgatatataaatatgtacatatttaagaatatttcacctgtatttgaattctaaatattttcacacatatgtacatgtggacctttctatactgccaccctccacatccactttcctacctctggttctcagtcctcttccacagaggtaatgggtttgcagtggagagaaccaaagtcccactttcaccttttgttctcttcaaattaaggccagctccattcccaacccctcagcctgttatagctgttgatgtccctttctggcatgatttaggcactagtgatacactgtctcactacgaccatccaggtatcaggtctgagtggctcgaagtacttgatgcgacagggcatggtggctcacggctgtcatcccagcactttgggaggccgaggcgggtggatcacctgaagtcaggagttcgagaccagcctggccaacatggtgaaaccctgtctccactaaaaataaaaaaattagctgggcgtggtgacgggtgcctgtaatcacagctactcgggaggctgaggcaggagaattggttgaacccagaaggcagaggttgcagtgagctgagatcgtgccattgcactccggcttgggcaacaagagcaaaacttggtgtcaagaaaaaaaaaaaagtacttgatgcaagaaattagacactctaataggaccactgatactcactgtagaaacaaagccaggtttctcaaacaatgggtcatggaaaatccaaggaataaggtctcttacccttagtgttcctcattgttcaaatgtgtactgtagaagcatggtcaaaatctgaaaacatatgttagtgagttctaggaatgtgataagcccttggcactttaagggctagactaactgtgcagttatgtaaaaacaaaaaaaaaataccataaaagaatacttacattaacaaatgggaagaaaaaagccacatataagtatgtacattgggctatcgttttattaaaaaagaatactccaaaatatagtagtgtttatttttggataatgagactacaggtgatttttgttttttcttttggtacttcccatgtttcccaaactttctgtattgagcatgaattactctcttaagttactttacaaacatctcaagtttggtgccaactctgtgttcccatatatggtgttgttgctggacaccacgtatgactccaacgtgtccagaaaccaccggggtcccccaatagggctagtagcaatctagcagcaactccaggcctgtaaggggttagtgctagaacattacccacctcagtggctctgatcagtttgggaaaacctcaataattatccaacttggtaaaatactttaggtgtcccctttgaaccaaaagagatctctgaaaaggcccaaggaactactttatacatcctctacacgtttaagataatctgaacacatagtagagatctgccagactatggacatgggagctgtaatcctcacaagccgggagagccggggagagggtccgagtgggccggcgcggggggcgccaggttgccagccccagacccgaaatcccaggcaggcccagggagaggggactctcgggtggcttctccttacttcgtgtctttgcctttgctcttgcctttctttttgtcctttcccttcgacggcatcttggcttccccaggggctccgctgtcgtagttgcccagccgcggccgccctggccagctctgtctccaagggaaccgggacgccgagctggcaatgccccacccgcgccgctgacggcgcgcggagagcgcacgcgcccgtgacgtagcccaggcgccgcggcgcgcggggtggggcggaggtcgcgccgagggcggcgggctgccgcgcaagggtggcgcgcgcgcggtgagtgtgcgagtgtcggcggcgccggatcctctacgtggggcccgggctctgcgggcgggaggcgggagctggcagccccaggcggtagcgcttcgtcctgcggcctgggtgtgtcaggagtcgctgcggtcggggcgcccttgcctcaggagacttagatccccgctgatccgcccgtcccgccgcagtggtctgagccgcagccctttcccgtgccgcccgcgggtcccgttcctcccgtgtctccatgccgcagccagcgtggccgcggctaccttgccctcgcccccgctccgcttctgccgctcccggcactgccttactcctttgggttgcatctctttcctggcttttcacccttgctgattctgtaagggatagtgcagccagcggacgtcccaggccaaatgttttttgataggcagtcgaggactttcccgagggcggtggttgagggcgaggctgccagcctccgaagagcagcggcacgccagggagccgggcggggaggggagtgctgccaccgaggtcgggagcagggtcctcggcctcactaggtcctgtgtggccgatacttcctgcccacgaccgccccccggatttccatttgctaataccggtccgcagccttctttcctgaaagttgcataaagttggaagctcttcaacttgcctccccgactcctgaaatcccgaatacacctctgaaaaggagtgtactcacaagtattctcatttttcaatgagagtcagtcagtgagtcattaaggaaggtacggtattctgagtgccaagccaatagttaggagacttgtgrttgaagctctgctctgttatactccatttcaaattaaaaagtttattttaaatgtggttgtagatccttcgtcaccatttctctagggaggacttaatccgtacactccttcccgatgtctttgacctctaattactcccctccgccttgtttcccacttgcatagtttctgtttctgaatttctgtttcttctgagggaacatgccgatttggtaatgataagccttgtaaacttttttttttttttttctgagagagagtcttctgtcacccaggctggagtgcagtggggcatctcggctccctgcaacctccacctccttggttcaagcgattctcctgcctcagcctccccagtaagtgggactacaggtgcatgccaccacacccggctaatttttgtatttttggtagagatggagtttcaccatgctggccaggctggtctcgaactcctggcctcaggtgatccacctgcctcggcctcccaaagtgttgagattacaggcgtgggccaccgccccggctgtaaaccttttttttgagacaagagttttgctcttgttgcctaggctggagtgcaatggcgcaatctcggctcaccacaacctctgcctcccgggttcaagcaattctcctgcctcagcctccccagtaacagactataggtgcgtgccaccatgccaggctaatttttgtatttttggtagagacagagtttcaccatgctrgccaggctggtcttgaactcctggcctcaggtgatccacccgccttggtctcccaaagtgttgagatttacaggcatgagccaccgcccccggctgtaaaattttttttttttttttttgagacagagttttgctcttgttgcccaggctggagtgcaatggcacgatctcggctcaccgcaacctccacctcccagttcaagcgattctcctgcctcagcctcccgagtagctgggattacaggcacacaccaccatccctggctaattttgtatttttagtagagacagggtttctccatgttggtcaggctggcgtaaaccttattatacataccatctgccagcatgatcatggctttttcttttctttttttttgagatggagtttcgctcttgtttcccaggctggagtgcaatagcacgatctcggcccaccgcagcctccacctcccaggttcaagcaattctcctgcctcagcctcccgagtagctgggaatccaggcatgcgccaccatgcccggctacttttgtaattttagtagacacggggtttctccattttggtcaggctagtctcgaacttccaacctcaggtgatccgcccgcctcggcctaccaaagtactgggattacaggcgtgagccaccacgcctggccgatcatagctttttctgagtgtatttctggtatactttcacactcccgtgagtccataggcggaatcgccatatattgaagagtttatctctgatgtaaaatctataaagttaccattaattttgtatgtgtaaggttctgaaaaagcacactgttgataagctgcagaaaagagagtagggcatcttctgtcacaggctgtatatttggaatttattctagaaattggtaactttataatatgaaagtcagtccaagactcctcatttgaacataggcttacagattaatgtatgaacataaaaatttgactataacaagattattaatgtatgcgtagtaccttagttatagtactttatagtttcttttattggtttttgggttttttgatggtttttttgagatagggtcttactcttaaccatgctggagtacagtggcaggatcatggctcattacagcttcgacctcctggacttaagtgatcctcccacctcagcctctggcatagctgggactgtaggcatgcaccaccatgcctggctaattttgtattttttgtagagacagggttttgccatgttgcctaggctggtcttgaactcctgagctcaggtgatcctcctgccttggcctcccaaagtgctgggattacaggcatgagtcgccacacttggcctagtttattttattgtattatatatattttttattgactaagtttgattttgtagataaagctgttgtgacatgaatatggctcagggaaatgccaagatttcatactcnggtagaggtggatatagagtctacattcttctgaatcccctcattttctaccaaagaactggatgttgttactgtcatctgctggtgagcaacaactgatagtacagatagtagagtaggaagttgctatttagtagtttatctggtagcatttccttccacagttactggtaggtgcctttactatgaagttccaggaattattactaaataaattttccttgtttcattgtttagaacactaatgcttttaaacttggaataagccacttcatgttttgttgacttggttttgtaattctttttctgtccagttttccttgttcctggtcaacaaagaaatgtggagtgtcttggctgaatcctcatacagacaagatcattatggtgctgttaggtaggacttgtatccagatgtaaggtaatatctccactagcttaaatttataaatgtatttcaaatgttcctgaatggtggttttctttttttcctgaatttaattctctgttttttgccaagtgatgttaattttgtccaacaagccatatataaaatttagaactattatgtatcaaaatagatagaatttctggctggtcatggtggttcatgcctgtaatcctaacactttgggaggccaaggcagacggattgcttaagcccaggagttcaagaccagtctggacaacatggcaaaaccctgtctttacaaaaaatacaaaaattagctgggtgtggtggccatgtacctgtagttccagctactcaggaggctgagttcagaggatcacctgagcccagggagatcatggctgcagtgagccgtgccactgtattccagcctgagcaatggtgtgactgtttctcaaaaaaaaaagggggggcggggggtgggtagtacttctgcttttttcttctagtaggtccaaaactgggtttactttataaattcatctataactttattcgggtttaccttagaggccatgtttcccttcataaatcattcttgagatcaccttatagcagatggtactttataggtggatcagtctaagtgaacaactttagattttgtttctacatagcctttagaatcctgaataaatatattattatccaaactgtttcttatgggagttactttctttttttttttttttgagaggtagtcttgctctgtcgcccaggctggagtgcagtggcacaatcttgtctcacttcaactctgcctcccaggttcaagcaattctcctgcctcagcctcccgagtagctgggattacagatgcctgccaccatgcccggctaatttttgtattttagtagagacagggtttcacccccatgttggccaggccggtcttgaactcctcacttcaagtgatctgcctgcctcggcttcccaaagtgctgagattacaggcttgagccaccacacctggccaggagttactttcatcctgcttttttattgcatgtgctgcaaatatagaattctactaaattgacattttctcgtgatattaagactagttcacatctctgcaggggcattttaagaaatcctggcggtcaaggatttaatcttatcacttttagataaatttttaaaaatttaaaacattcaatgttttacttatatacaagatatgttaccacagataattatttgtttatttatttgttaatgaatgacagggtctcactatgtcacccaggctggagtgcagtggtgcaatcatgactcactgcagccttaaccttctggggtcaagcaattctcccatgtcagtctcctgagtagctaggagcacaggcttgtgccaccatgcccagctaacttttttttgtggggggggggagtaaagactggatctcactctgttgctactgggctcaaatggttctcctacctcaggcccccaaagtgctggaattatagttgtgagccactatgcttggccatatatttttgaaatggggttttgttatgttgtccaggctgaacttaagctcctgagctcaagagatcctcctacttcagcttcccaagtagttgggactacaggcgtgcaccactatgcctacaaataatcattaactactgttcctttatttgcaaaatatcccatttttattagttgtccatcccaacagagccacagactaaaagttctctaagaaaacttacctggactgggcacagtgactcacatctataatcctagcattttgggaggccgaggtaggaggattgcttgagcctaggattttgagaccggcctggacaacataacaagaccctgtctctattttttaaaaaaagcaatgaaaaattacctaagttttaggcccacttgtctgcatttttatgtcatggatctgtcaaatgttcattcatttaagaaacatttaatgaataccaactgtataacagcctgtctgataacttcatgggtacagtaaggaacaagagaaggcccttgccctcaaattgtttacagtcagatgtataaagctctgacctggatgttgatctctgagaatatacaaccttattgtcacccatacacaaacacttaacagtaaacagtaccaagcagggattgataaaggagagatggtgtagaccaggggtgtycaatcttttggcttccttgggctacattggaagaagaagaattgtcttgggtcacacataaaatatactaacactaatgatggctgatgagcttaaaaaaaaatcacaaaaaaagatctcataatattttaagaaagtttacaaatttgtgttgggctgcattcaaaaccatcctgggctacatgcggcccatgggctgtgggttttgactaagcttggcccaaaccctaggtgctatagaatttggaggcatttaagactgtcgtagtcagggaaagtttatagaaggagatggactgaaaggagagggaagttcctctgggaagttagaacaatgtgagcacaattcagagtatgcttaaaatagggagtagtttaactctagcattggttcctaaagtgtggtccacagaccggtaacatcagcttcacctggtaacttattagaactacagtttcacaggccccacctgagacctactgattcagaaatactggcaatgaggcccagcagtctatgccctccaggtggttctgatgcgtgctaaagtttcagamccactagactagagcagagggttattgtatggaacaagtaggcaaaacactctaaaaaggtaggctgggaactcattgtgaatgacttagaatgtcagacagggagtttgtcttttatcctgcagactagaggccccagcttgtgacttgagggctggacttggctcatagaatgtgtttcgtttggcctgaatggtaggtttttgggggtttttaaatggaattagttgtcatcatttaaaaatcagcagattttacaaagaaatctgtgctttcagcttaccttgaaaaatcagaagacctggcagtatggagcctacattccattatggtagcagttggtgggaatagcaagaagctgcccctttagatgggacacatgctctccagtttactgcaatccccaccggttccttttgtcttacacacacctttactcatttatatttcctgcctggtgcctgtaggtgtttgagtttgtaacttctgttgtggacagtgggacattaatgaaaattttgagaagcagagtgatgagatttatgtatttgttaatttatttaacaaacattaattaaacatatatgccagattgtactctgttaagtaatcagtgttcaaagatgaatgagtcccagctgggaccggtggctcatgcctataatcccagcactttaggaggcgaagtctggtggatcacttgaggtcaggagttcaagaccagcctggccaacataatgaaacccccccctctctactaaaaataaaaaattagccggggatggtggtgggcacgtgtaatcccagctacttgggaggctgaggtgggagaattgcttgaacccaggaggcggaggttgcagtgagccgagatcatgccattgcactccagcctggatgacagagtgagactccatctcaaaaaaataaaaataaataaaatacatgtttactttggagaccttatagttagaatttataacatgggttgcgtgagtcaaatccataattcaaatcctgtcttgaatgtgtaatcttcagatttatgttgcataggtaagtttaacttttttgttcctgagggaatagaaaataatatataaactcaaattcttaagtgattctttcacctcagcctcccaaagtgctgggagtataggcatgagccaccaagcccccatctgcttggtcccttttaaccacatactcgtgcatgtaatagtaagtagccactcattgatcatactgtggaacatatggctgacattttaacagcaaaaaaagacctcacatctcggctcactgcaacctcgacttcccatattcaagcaatcctcctgtctcagcctcccaagtagctgggactacaggcacatgccaccacacctggctaattttttttatattttgtagagatggagtttcgccacattgcccaggttggtcacaaactcctgagctcaagctgtctgcctgccttgacttcccaaaatgctaggattataggcgtgagttgctgcgcccagtctgtgtactttacttatgaattagctccttggtcattgccttctccacctttacacacacatatacaccagcttctagagggagtgtgacttgcttctcttgctgttggtgactttttaaatgagctggatgtgtggtaaagtggctgaggttgtagtttgagtgagaagaaagtgtaggggagcagaaagagctgaagggcattagactacaactcaggagatgagcttggtgatctgggttccaaagcctgaaaagattagaaatgaaaatgtggaagagataactgagtcaaaagtaggcatactgacagcagagaaaaagaggaaactgttcttataattattcatgtccatcttacacaggttgaaaaagtgatataataaaggaaccaaggagaaaattcagaaggaaagaaaaaattggtaagtaacatatataagtaatacttcactttttcataggtcagatttctgcaaattctgctttgttgttcctagctgagagctcacagtagatggaaaagggtccataaggcactgaaagagctgtcacaaagtgcagtacccttattctgttggagaggtcttcatttgcttatgttgacatgaaattctaataattatggcttcctgatttacatcctacaacagatttaaaaagaaaattaggaggtaatggtggtttattgaaggagctgggcacatgacartactgatcagtgaaaatakatagcatgatgtcagaaaaaactagctcaaaaaggatagcaatctgggaccatttggtgacagaagggcaaacagtcctgtagacctactgtagcccttggaggcatctcaggtttacaggaaaatataactgataatcataatcatgactytgaactataaataaaagtggtwttccctgtaggaaattatataattcacaatggaaacactttttattttttttttttgagatagagtttcgctcttgttgcccaggctggagtgcaatggcttgatcacggcttactgcaacctctgcctcctgggttcaagcgattctcctgcctcagcctcccgagtagttgggattacaagcatggggcaccatgcctgactaattttgtatttttagtagagacagggtttctccatgttggtcaggctggtctcaaactcccgacctcaggtgatctgcccaccttggcctcccaaagtgctgggattacaggcgtgagccactgcgcctggccgaaaacacttttaccaaacactaagtgttatagtggagccaggtgcagtggctcacacttgtaatcccttgagaggtttgggacttgggaggctgaggctggtggatcatttgaggccaggagtttgagactgtcctgggcaacatagcgagactcctttctctataaaaaaattgaaaacacggctgggtgcggtggcttacgcctgtaatcccagcactttgagaggccgaggcaggcggatcacgagatcaggagatcgagaccatcctggctaacacggtgaaaccctgtctccctaaaaatacaaaaaattagctgggcgtggtggcgggcacctgtagtccctgctactcaggaggctgtggcaggagaatggcttgaacccaggaggtggagcttgcaatgagccgagatcatgccactgcactccatccagcctgagcgacagagcgagactccgtctcaaaaaaaaaaaaycgaaaacatgcaaaaattatctgggtgcagtggttcatgcctgaagtcccagccctctgggaggttgaggcaggaggattgcaggagtttaaggcsgcagtgagctgtgattgctccactgcagcctgggtgacagagcaagaccttgtcaataaaattaaatttttttaaaaaccccaagtttttttggtatttagaaggaaagcattttaaagccacatttggtgggggaaagacaaatttgggaaaatgtaattatggggaacccctattccttcctttatacatgaaactatcattgtaatatttttatctttggcatgtttttcattttgatttaacatgtttgaagcagtagctatttttcagttgataacaagaaagggaaaatgtttttattctcttcccacagttaaaatccaatataaacggtgcccagtggcactgatcctagtggcagttactcttctgtaaatagtgcctcccacaatggatatgggtttggaggcagacagagcttatcacctcagattttcattctgatttttcattggggcaatatgaaccccctcctgaatgacagtatcttcttatctaaaggactttgattcttaatgaatgggcaagaaaagaccttctggtttgtgaagaaaaagaggcaacaatagcaacagctttcctccaagtgattattgtagcraagtcaagcctgaaacaatggagaatgaagttatgcctgactcattttgttattacacccaaatgagttcattgtacagaatgggcctttttgacacgtgtctaatgatattttgatgcaaatgaaataatacacataaaaaatgacctgtttacaggaaagactgatgtatttgttgataactaccagtgacatcaattctcatttctttattggcagttacagtatttgaatttagggttagaccttaaaggatatatccagccaggcatggtggtataagcctataattccagctactcagaaggctgaggcaggaggatcactagaactcaggagtttgagaccagtctgggcacaagaagaccctgtcttaagaaagaaaaaataaaagtctaggccaggcgcagtggctcatgcctgtaatcccagcactttgggaggccgaggcgggtggatcatgaggtcaggagatcgagaccctcctggctaacactgtgaaaccccgtctctactaaaaatacacaaaaagttagccgggcatggtggcaggcacccatcgtcctagctacttgggaggctgaggcaggagaatggtggcgtgaacctgcgggaggcggaggttgcagtgagccaagatcgtgccactgcacyccagcctgggcgacagagcgagactccgtctcaaaaaaaaaaaaagaaaaaagaaaaaataaataataaaaaataaaaggctatatcatttgacaagccgtctgatcagtgaatctgttctggaaacatgatcagatttggagcaaagacccttccctccctaccagtttgagacagctcatattgttggaacttaattctgttcaatccctcccccaggaggttccatgctcactggtcttattatatgtaagtctttgacaatgatctaagaaaagctgagttaaaaaawtttttttttctttgtctgggggtggtggcttatgcttgtaatcccagcactttggaaggctaaggtggacgcatcacttgaggtcaggagttcaaaaccagtgtggccaacatagtgaaaccccatctttactaaaaaatacaaaaaaattagctgagcatggtggcgggtgcctataatcccagcttctggagaggctgaggcaggataatcacttgaacctgggaggtgcaggttgcagtgagccaagatcacaccagtgcactccagcctcagtgacagagtgagactccatctcaaaaaaaaaaaaaaaatttttttttttcaacacaaggtctcactctgtcaccgaggctggagtacagtggtgcaatcacagctcacggcagcttcaaactcctgggctcaagcgatcctcctgcctcaccctcccgagtagctgagactacaggtatgtgtcaccatgctcagctcaaaagctgacttttaaataaacctttttattagttttattgacttgaaaaatattgctataaaatttttctatggttttcaaatctgttccagttgtcagtcttgtcccttttcaccaaatacctcttcagtacctaatttttttttttccaaggtggagtcttgctctgtcacctagactggagtgcagtggcgtgatctcagctcactgcaacctctgcctcttgggttcaagcaatttcttctgccacggcctcctgagtagctgagactacaggcatgcgccagcatgcccagctaattttttatatttttagtagagacggggtttcaccgtgttagccaggatggtcttgatttcctgacctcgtgatccgccctccttgacctcccaaagtgctgggattacaggcgtgagccaccgcgcccggccatacctaatttttttctaagagacaggatcttgctatgttagcttggctggccttgaacttctaggctcaagtgatcctcctgagtagctgggactacaggtgtgtgccaccatgcccagctagtacctaattgttaatgctacctgatatgattggaagtttttttctgtatgtagcataaagtttctattctgccaatacaagtattttctttcattctgtatctttgttgatttagtgtttaatttcagatttattatttaattcttaactgatatgtatcttcaaaacaaatacagtgactcatttattttcttcctactctttcttaactatatctgacttttagttgaataataggtggggtagctcaggcctgtaatcctaatgctttgggagactgaggtgggaggatctcatgaagccaggggtttgagaccagcctgggcaacatagcaagactccatctctataaaaaatttgaaaattcactgggcatggtggctcattcctgtagtctagctagtcaggaggctaaggcaagaggatcatttgagctcaggaggtgaaggttgcagtgagctgtgtytgcaccactgcacttgagcctaggtgataaagcaagacatcttctcatttaaaaaaaaaaaaaaaagggccgggtgtggtggctcacacctgtaatatcagcactttgggaggccgaggcgggcggatcacgaggtcaggagatcgagaccatcctggctaacacagtgaaaccccgtctctgctaaaaatacaaaaaattagccgggcgtggmggcgggcacctgtagtcccagctactcgggaggctgaggcaggagaatggtgtgaacccgggaagcggagcttgcagtgagccgagattgtgccactgcactcctgcctgggcagcagagcgagactccgtctcaaaaaaaaaaaaaaaaaggcttggcgaggtggctaatgcctgtaatcccagcactttgggagtccaaggtaggtggatcacctgagatgatcaccagcctgactaacatggagaaaccccgctttgtctctactaaaaatacaaaatttgctgggcttggtggtgtatgcctgtaatcccagctactttggaggctgaggcaggagaatctcttgaacctgggaggcagaggttgtggtgagccaagatcatgccattgcactccagcctggggaacaagagtaaaactccatctcaaaaaaaacaaaaaggtatttaaatttcttttcacctttagaaacaagaagtacattgtgtgagttgtagtttttctgactttaattcttttccttaagtaaaatattaggactataacagaagatggaagttaaaagtcaagtcagcattgttgttcattttgtttgtttatttgttttgttttttatttatttttttgaaatggagtcctgctctgtctcccaggctggagtgcagtggcatgatctcagcttaccgcaacctctgcctcctgggttctagcgatcctcctacctcagcctcccaagtagctgggattacaggcgtgcaccacacacccagctaatttttgtatttttagtagagatggggattcaccatgttggccagactggtcttgaactcctgacctcaggtgatccactcccctcagcctcccgaagtgctgggattacaggcgtgagccaccgcacctggccagttgttcatttttaagagttaatagcagccgatgtgatggctcacacctgtaatcctagcatgttgagaggccaaggtggaggattgcttgaggccaggagtttgagagcaatctgacaaacatagtgaaaccctgcctatatttcttttctttttttttgagaccgagtcttgctctctcacccaggcaggcatgagccaccacgcctggtttatttctttttttctttttttctttttttcttttttttttttttttgagactgagtctcaccctatcgcccaggctggagtgcaatggtgcgatctcagctcactgcaacctccatctcccgggttcaagcaattctcctgcctcagcctcccgagtagctgggattacaggcatgtcccatcatgcccagctaacctggcttatttctatatattatttttttctaagaataaacaaatgaacaaaaacagttaatatcattggaataacatgcaggtcctaaaataagaagtatgtaagatgtgtttattgaaatatatatatggtatactggaaaaaaaaccccacaaaatattacacaaatactggttacagcttacagtagccagcctccaagatgccccccagtgatgctcacctcctaatattcatgcctttgtgtagtccccttttacagttcgtcagggttggtctgtatgagcattagaatatagggatatgatagtgtatgacttccaaaacaaagtcataaaagacattactgcttctgccctgctcttcttggattgactgctctggaggaagccagccactgggttataaagacattcaagcagccctrtggaggatctacacggggagctactgagacttcctgcccacagctggcatcaacttgccaaccattgagtgagccatcttggaggtgggtcttccaggcctagtcaagccttcagattgactgcagccccagcctacatcttgactgcaatctcatgagagcctcagagccaaaactgtctaattaaaccactctcagagtcccaaaccacagaaataatgagataggccgggcgcaatggctcacacctgtaatctcagcactttgggaggccaacgcaggtggatcacctgaggtcaggagtttgagcctggccaatatggcgaaaccccgtctctactagaaatacaaaaattagccgggtgtggtggggggtgcctgtagtcccagctacttcggaggctgtgacaggagaatcacttgaacccaggaggcagaggttgcagtgagccaagatcacgccactgcactgcaacctgggcaacagagggagactctgtctcaaaaaaataaaaaagggatgagataataaatatttttattgcttaatacatgtatttatttacttaattaatttattttttgagacagggtcttgctctgtcacccakgctggagtgcagtggcatgattctagctcactgcagcttcgaactcctgggcttaagtgatccttctgcctcagcctcccaagtagctgggactgcaagtgtgcactgccatgcctggctaattttttcattaaaaaaaaattttttttaatagggttttgctgtgttgcccaggctggtctcaaactcctgggctccagtgatcctcctgccttagcctcccaagtgttgggatttacaggcatgaggcaccatgcccagccaattttttttttctttttttctttttctttttttttgattcttcagctaagacagcagaagagatgatttatcgtatggttgttatactcggccacaagtaaacacagaaatagtccagaatgtcccaggtccagggcagaggaccaacatgggcagttttggttatgagcaaggtgggtctcagaggtgatcagcgatcagagggcggtgaagttctggatccattgagacaagctctacacaatagcatgcagtcccacaacttgtaccagcatccccagcatctggcattccatgtttctgctcctgtgtggcctccacggtgcaacaagctagcggtttacttggacctctgcctcatctttcttcttttgtgcttcagactgcacattcgctttttcctccacttagctctcatgatgcagaggtttccaagaaaatggcgctaaggcygagagaaaccctagcccatttctattgtcagtttttattgaattccaccttggacgctcttctaggttcttgggttacaccagtaaacaaaaagatttctgctcttgaggagcttatattctatcagaggaacacagacaataaatatmagtaagctttccagtatgttagaatgtgataagtggtgtggaaaaaagaaaagtggatcagagtaaggggagttgagaaagcaggtagaggtgggagcatgtgaaggtgagaggttatagtattaagtagatctcaataagaaagtgatttttaaacaagtatttgaaggagttgcaggaattcatcaagtggatatataggaaaagaatttctaggcagtggggacagcttagagcgaaggccctaaggcaggggcatgagtgaataagcgcagaggtcagtgttgggggagagtaaggtgaaaactattagtagatggggtcagagatgtagtggggatggaagcagaaggctattttcaggaccttgtttctctgaaatggggagccagtgctggattttgcataaaacagagacatactctaatttatattaaaggatgactttggttgtttgttaaaaggagacaaactccaggggagtgaggataaaagcaggaagatctgttaggacaatattagcaaatcacatgaaagatgatagtggcttgggcgaaggtggtagcaatggaagtggtcagaaatggtcggattctggaaatgtattcaacagcaggaaattaagatcttcaaaatctcttgattagctgggcacagtggctcaaccctgttatcccagctattcaggaggctgaggctagaggattgcatgaggccaggagttcargaccagcctgggtaacatagtgagactccatctctacataaataaataaataagctcttgattttatgtaagaaggtcagactgctgtaagactttcacatcctgatggaagtctcactttccagcctcatctcagaccattctctgctctacactcgcctccccactcccatatctgtcttttccaagagccctgttagataatccttcttgggtggcctactagttaagactgtggctctggaattaaaccatctgggtttgatttctggctcatttcatttaactacgatgtggtcttaagatacttagtttctctaagctcagttttctcatttataaaatgggaatcttaataatagcacctaactcacagagcagtaatgtgagattaaatgagctaatctatgtagaatacttaacatcatgcttggcatctactaagatctccgtaaatattggttactatttttttaaaatctcagattatgtttctttgaccacaatctttatcctctgcattaaatgctaaccctcttcttctatatcctctttcactagttttctactttttrtttctcaaattcatataaaaaattcttgaggacattggcttttaattattattatttgagacagggtctcactctgtcgcctaggctggagtacagtggtgccgtgcaatcacagttcacctcagcctccacttctcaggctcaaatgatcctcatacctcagcctcctgaatagttgagactacaggtgtgtaccaccatgcctggctttttttttttttttttttttttttttttttttttgagatgaggtcttgctctctcgccaggctggagtgtagtggcatgatctcggctcactgcaacctccgcctcccaggttcaagcgattctcctgcctcagcctcccgagtagctcggactacaggtgcccgccaccatgcctggctaatttttttctttttttttgggatggagtcttgctctgttgcccaggctggagtgcagtggtgcaatctcggctcactgcaagctcggcctcccaggttcacgtcattctcctgcctaaccctcccgagtagctgggactataggcacccgccatcacacccagctaattttttgtatttttagtagagacgggatttcaccgtgttaaccaggatggtctcgatctcttgacctcgtgatccgcttgccttggcctcccaaagtgctgggattacaggcatgagccactgcgcccagacacaccctgctaattttttaatattttgtagagatagcatttcacyatgttgcccaggctagtctcaaactcttggggtcaagcaatcctcccactttggcctcccaaagtgctaggattacaggcatgagtcatcatacctggcctcgctatttttaatttttatacggatagggtctcactgtgttgtccaagctggacttgcactccttggctgaagtgaccctctttcctcagcctcctgagtacctgggactatggtcacgtgccactccatatggctcttgaggaaatttttaaatgaaatcaaacgatacttttcctatcatctttttctaatctctctggtctttatacacatctggtctctattatttctgtagttatttctgtccatttttcatgattgcttacatgtcatttcattttttttgttgttgttttgagacaggttcttgctctgttgcccaggctggagtgcagtggcatgatctcggctccctgcagcctcgcctcccaggttcaagcaattctcccacctcagcctcctgagtagctgggattacaggcacaccaccacgcctggacaatttttgtatttttagtagagatggggtttcaccatattggccaggctggtcctgaactcttgacctcaggtgatccaccctcctcggcctcccaaagtgttgggattacaggcgtgagccactgtgcccagccatttcttttatatatgcttatatatatattttttaaattgagacggggttcagtcttgtcacccaggctggagtacagtggtgcgatctcaactcacagcaacctccacctcccagggggctcaagcaatcctcccacctcagcctcccaaatagctgggactacaggtgcattccaccatgcctgactagtttttgtatttttggtggagatgaggtttcatcatgttgcccaggctggtctcgaactcctgagctcaagcaatctgcctgccttggcctcccaaagtgctaggattacagacgtgagccactgtgcctggtctcaaatgtcttttcttgatgcgtttccaaatcctctagggagttagtcctgtgtttttgttcctttaccttttttttttttttttttgagatggagtctcgctctgtcgcccaggctggagtgcagtgacgcgacctcggctaactgcaacctccgccccctgggttcaagtgattctcctgcctcagacccctgaatagctgggattacaggtgcatgccaccatgcctggctaatttttaaatttttggtagagatggggtttcatcatgttggtcaggctggtctggaactcctgacctcatgatccgcccgccttggcctccccaagtgctgggattacaggtgtaagctactgcgcccggccctttacctttttttttgagacggagtctcgccctgttgcccagtctagagtgcagtggcttgatcttggctcactgcaacctccgcctgccaggttcaagcaattctcctgcctcaccctcctgagtagctgggattacaggcacgcgccactgcgcctggctaatttttgtatatttagtagagacggttttaccatgttggtcagtctggtctcraactcctgacctcatgatccgcccaccttggcctcccaaagtgctgggattacaggagtgagccaccgtgcccggcctacctttgttttttttkggggggtggggggcagagtcttactctgtcacccaggctggggtgcaatcctgtgatcttggctcactgcaacctctgcgtcctgagttcaagcaattctcgttcctcagtctcctgagtagttgggattacaggcgcatgccaccacacctggctaatttttgtatttttagtagatatggggtttcaccacgttggccaggctggtcacgaactcctaacttgaggtaatccacccactttggcctcccaaagtgctgggattacaggcgtgagctactgcgcctagcttctttaccatttttatgcttagtttaaaaagttacggttatttttatatatgtctgccacctctgccagactcagcatcttgaataaaaagatctgttttcctcacctttacttttctggcacctagcagttagtaggcatcagtaagcattagtagaattaagcaattgagtggtcctgacaaggctcctgactgcagtccttacatgtaactaccagattcgtatttggatactccctagttcaatatcttcagtggcttcctatcacctgcagagtaaagtccaaactccttagctgagtatttggtgtcctctactatgtgacctcaatctatctcttcaactttattttctactatagttggtcaaactgatccattcactgttcctcaggggcccccatcccttttccacatccgtgtcttgattcatggttttattcctgaaaagcactccttgcctgtcctaattcatttccctcctcaggaccctcctcagatacgacctttttcacagagccttctccatcatcccagctttgaagtttcagagcatagtaactgtgctgcttgacacattttcactttatagaggtaatttatggacatgtattttttttttccaacttagtatagtttcttagggtttcttaaagtttctaagatgatttatctttgtgtgctgtacttgtaagcagcagtaagaaattgctaatttctggaatggctgtcactgtcggttactacaggttgaatgaaggggacaaacgcagaaatgaagacaaagacaaaaggatctgtttcgaaagaaggggtcagggagctccttgcttctagtgagcaaaggcagccctgagcttctaccgcccttcgtatttattagatagaaagagcagggagggagaggtaacagttggtcagctgctagatttatcacaggtacacataattgctttctttgtacaacaggcttcagatgctcctatagataattgcaaggaacactgcgctgggggtgtgactgccctcagcaccccttctggtggcagacgcagtttgtcagttttccaacatcctgctttcatgagaacagttttctgtttgctcatataacctccaatggcatactgagttggtcacgaccctcattctttctgcctgtaacacatggccaaatgaatgaatgaatataggaacaaataggcttcacatgccctatccatggtctagtttggaggggaattgggagttggacatgtaatacctaggccgtagtggaacactgggaaagggggtactccttgccctattgcttctgcctgcatattccattagcctaattgtaccaagtccatttgggattcaattactggtgtccagcatgttccaggcctaatattaatacctgtctttggtaatacaaaagataccatgcaccacccaccttagacatccttcagatagcaaggtgtgtcagggctgtggccctttgtattataagttatatcctcaaataaggcattgctcactttgctgcagcctgtcctgaacttagcttattagacctaccttggttttgcttggcttggcttacttatgcactgggtggtttaactatattggttccatagttcagcttactgtttaaaaatttcattctagttacattttaaacttgccttatgtttaatttttaacttgttaaggctagctttgctgtggagctcagatgaattgtcagtgggagcttttacatttcactctttttggaccttttggtggacctttctaatcacctatccaattttccactgttgtgagatactgtattattttatccaagtcaatcaataatgatatttgcttagggagtcaacagaaagacataactaacaatcaatctcactatgggaaargaaaacaagtccactccttttgaaatctgattctctgcttccagagccattttccctcactctggctgtctttattctggtacacctctatattccagctgtaccaagctgttaatacttgaagttctcagaatcctccttgtgtcattttcccaggataattcctacctctcatccctcaagaagcttcccagtcccatcccaccttcacctttccccttccaagccaagtttcttgtcccttatgtctgttcctagagcactttgtgtgcatttctgtcagagaacttatcacagtacattacagtcgttggtttgcttgtctgggttttgttagtttgttttttgagacaggttcttgctctgtagcccaggctggaatgcagtgatataatcatggttcatgcagccttgacctcttaggctcaagcgatcctcccaccttagccttctgagtagctgggactacaggtgcatgccaccatgcccagataatttttttatttttgtagagacagagcttcactgtgttgcccaaggtggtcttgaaatcctgacctcaagtaatcctcctgcctcgaccttccaaagtgctaagattacagacaagagccactgtgcccagccctgttttctccagtaagctgaaatttcttctatatcggattcctctgtatatatcaagaatctagcacagtgcctggtatatattagatactcagtacatgcttattaactagacaggtgaatgcccaggtttctaaagttttttttttttttttttaagagaccaagttatgttccatccaggtttctaaattctgtgtcagggatggaaggtattgagaagtgctattaacttttctatttggctaacaaaaacacagaaatgagttgctgagcagcttccgccctatgagcgataatcctactagttggaagttaactatgataaaagtagatgaacgaattgtgtactcagagaaaaagagagtaagggaggagggaaggatagagaagggagtgagttagcaaaatgccacactgttagttgcaaactggcacaaaggtgaatgcggttcatgaggctcgcttgattaagaagagctgaaacaggagcaaagagcaaaaggcaacctgcagcgaaagcaaggactcagggaaccggcagacacaagcaggtgagcacatgaatggggcccaggtcctctgggattgtggtctctcaggcttccggggacatggaagaagggaagccagagtgtgacgttctgggaaagctgagtggggaggattcatgtstactccaggtataaagagacacaaaagaccatagaaggagatggagatagtgacaaacactggctggcaccagagtctcaacaaaaagaattggaaacagggctttgttggggggtgaataagagatagtgagcaagagaaaatgagaagaccaactgtgaaaggagtagatttaaatgtactgacgtatacatacctccctagtctacaaaaagtacgcctatctgcactattttgagtagcatataaaacttgacacatttggataaatgtcacctttatataacaaatgtggggaaaaccttcactgaagcttggaattgtgatttttttcaggggctgggtaattttttggaaagcagtcagctattattattattattattattattattattatttgagatagagtctctctctatcactgaggctggagtgcagtggcacacttaacaggcgtgagccactgtgcccgaycagctgttacatttttattaaatgggtgagatctagtgcctgagttactgtattattgtttatccctttggagtattcattcaacatctactgtgtgctcacaccaccattccagcaccaggaacacataaaaaacaaaacagataaaaattcctgcttacgggccagccaaggtggctcatgcctataatcctagcattttgggaggctgaggcgggtggatcacttgagaccagaagtttgagaacagcctggccaacatggcaaaaccctgtctctattaaaaatacaaaattagccaggcgcggcggcacatgcttgtaatcctggctgcttgggaggctgaggcatgagaatcgcttgaacccgggaggcggaggttgcagtgaggtgagattgcacaactgcactccagcctgggtgatagagcaagactctgtatttaaaaaaaaaaaaaaaaattctgcctggctatgtatagttcacatagtgggtaaaggtggcaggaaacaggaaatatgaaaataaacaaaagtaaattatataatgtgttagatggtaaaaagtcctgtggagaaaaataaacagaaaaggaagataggaaaacatgatgtggtcagatgggttataattttaaataaggtagacaaggaaggtctcactgagaagctgacatatttgagcaaagattttaacatagtgaacgagcaagctgtgcagactcgggttctgtaaaataggatgtcattctataaatgtaagactttttttttttttttgagatggagtctcgctctgtcgcccaggctggagtgctggtgcaatcttatctcattgcaacctccgcctcccgggttcaagcgattctcctgactcagcctcccaagtagttgggattacaggtgcctgccaccacgcctggctaatttttgtgtttttagtagagatggggtgtcaccatgttgaccagtctggtttcgaactcctgacctcatgatccacccacctcggcctcccaaagtgctggattacaggcgtgagccactgcacctggcacattagttattttaaaatggcttacattgctcggtgcggaggcttgtgcctgttatcccaggactttgggaggctgaggcgagtggatcacctgaggtcaggagttcgaaaccagcctggccaacatggtgaaaccccatctttactaaaaatacaaaaaattagccaggtgtggtggtatgcgcctgtaatcctagcttctagggaggctgaggcaagagactttcttgattccaggaggcagaggttgcagtgagccaagattgcaccattgcactccagcctgggcaacagagtgaaactccatctcaaaataaataaataaagtttaaaaaaataagacaatgcctaatgccattttaaaataactaatcttaaaagtgcgattgcaagtggtttagaatgtagttactgagagctgaaaggggcattctatttgttcatcctttgctttctctaaaatctattgtttggttttacactgaacaactagtatgactctgcagggttttttgkttktttttttttktttgttttttcgtgaaaacagatacctaggatgttttttttcacctttgaaatctctggaagaaaaacaaatatttacttaatagaaatagaagctggagaagtttttcaaaaactacaatgatatattaatacaaaatwtgggtgacccctgaagaaactgcagtcacacagaggaaggaaagctgctgcctagaatgccattaattcactttctgagggaaaagagggacccagagttggacaaagcaaggatctgttaacactcagagactctgaagagttgtttctgtttcgagttatttagtttgatctacatgtctagctcatttgctgtaaaagaatcagccagagtgtgaacctggccaggcagctatcctgtatcagtggttgatttcctgggatgaagtttcctttgtttgggattgtaaaaggtcaaacaattttgtctgttcctctcctaaccaatagctcttattcttaactacaggatagaagttcarccttgaatagtgttctaacggatggttccarctctgctttggtagtacctaagaccaaatctagttattttaaatattttatttattgagacagggtctcactctgtacctaggctgaagtgcagtagtgcagtcacagctcactgaacctcaacttcccgggatccagagatcctcccacctccagcttcccaagtagctaggaccacaggtgcatgccaccacgtccaactaatttttgtacttttggtagagatggggtttcatcatgttgcccaagctggtctcgaactcctgacctcaaacaatccactcaccttggcctgtcgaactgccgggattacaggcatgagccactttacccagcctaaatattttaaaattccaaatatagttaactttgttttatgtatttattttgagatagaatctcactctatctctcatgctggagtgcagtgacacagtctcagctcactgcaacctccgcctcccaggttcaagcaattctcgtacttcagcctcccaagtagctaggactacaggcctgtaccaccatgcccggctaatttttgtatttttagcagagacggggtttcgccttgttacccaggctggtctcgtactcctgacctcaagtgatccgcccgcctcggcctcccaaaatgctgagatgataggcgtgcgccaccacacccagctgcaattaactttaatttgcttttttttttttttttttgagacggagtcttgttccgtcgcctaggctggagttcagtggcacaatctccgcttgctgcagcctttgcctcccaggttcaagcaattctcctgcctcagcctccctagtaactggagcgacaggcatgcgccaccacgcctaatttttttttgtattttaatagagacagagtttcaccatgttggccaggctggtctcaaactcctgacctcaggtgatctactcacctcagcctcccaaagtgctgggattataggcgtgagccaccacgcctggcctaatttgctttattttgtgtaatatgtcacctgtggggagggagacattttgataaaccctagatactcaacaaagttgagatgattgagaatccttaatctgtactccaaatatacgaagtattttgttagagctgaagggcctgggaaatgggaactttagaatcagatcttgtcacttaaccagtaaactatgacttacataagagatccagagatgaaagctggatcagaagacccaaaactgtttggtgcaaagtacataaagtgcaagtcaggaagctttaccttagaggatagatacggcattattcattaataccggaagaaaatggcagagaaaacgtttatatacatacatatatatgaaaatattttatatatatatatactttttttttgtgagacggagtttcgctcttgttgcccacgctggagtgcaatggtgcaatctcagctcactgcacccttcacctcccgggttcaagtgattctcctgcctcaggctcccgagtagctgggaktacaggctatttaaaaaaaaatttttaaataaacataaaattaaaatacatagaatatattttatatgtaaatatacagagcaggaaaattagccagcagacagctggcaatgtctggagacgtttttggttatcacaactggttgtgggtggaggggcgggatgtgctattgacctctagtggatagaggctggggatactgctaaacatcctaccttacacaggacagcgcccacatcaagccctaattgttttttttttttttttttggttattgtttttttttttttaagacagattcttgctctgtcctccaggctggagcacagtggtgcgatcttgactcactgcagcctccgcctcccgggttcaagtgatgttcctgcctcagcctcctgagtagctgggattacaagcatgcaccaccacaactaactaatttttgtattttagtagagacgggggtttcaccacgttggccaggctgatctcaaactcctaacctcaagtgatccgccagcattggcctcccaaagtgctgggattacaggtgtgaggcactgctcctggcccctaaatgtaaacagtgctaagattaagaaaccctgaccttgaggaactccagttttcctttacrgatgagatcataggacacagtctgagctttgcaggaggccagatacaaatcaccaaaacaaaaagcacttaattgtttttgttggtttctcatttaatgtccatccagaaaaaaagagggggaaaaaagttgctagtaaagcaactgtgaagtatggatgccattattccattcaacactaccaagtgattttttgtttttgtttttgttttgagacacagtctcactctgtcgcccaggctggagtgcagtggcatggtttcggctcactgcaacctctgcttcccggtttcaagcaattctcctgtctcaacctcctgagtagctgggactactggcgcatgccaccatgcctggctcatttttgtatttttagtagagatggggttttaccatattggtcatgctggtctcgaactcctgaccttacatgatccacctgcctcggcctcccaaagtgctgagattacaggcatgagccactgcacccagccacaaatgttttttatcacaggtttcaataatattcaaactcatgataatggctttgttgcagaatgatggaaaaaaaccctatacatttaaaaaattattttccagtaaaacaaatccggctgggtgaagtggctcatgcctggaatcccagcactttgggaggctgaggcaggtggatctcaggctgagttcaagaccagccagggcaatatggcagaaccccatctctaccaaaataaaaaaaatagccaggtatggaggcacacacgtgtaatcccaactactcrggaggctaaggaggaaggatcacttgagcccgggaggtgaygattgcagtgaaccgtgattgtgccacygcactcchgccggggtgacagagtgagaccctgtctcaaaaaaagatggggagtcagaaaagagggagggagaaacggatatttatgttctaaagggaaaatcatcaaaatggaaagaagaaattagactcaacaataggagcagagtggcagagagcctttgagtatgtgagagccaccctacaattattattttttatttttagagacagggtcttgctttgtcacccaggctggagtgcaatggcatgatcatagctcactgtaaccttgagctcctggactcaagtggtcttcctacctcagcctcccaagtacctgggactataggcatgtgccaccatacctggctaatttatttattatatttatttattttttttgagacgaagtcttgctctgttgcccaagctggaatgtagtggggcgatgtctgctcactggaaccttagcttcccaggttcaagtggttctcctgcctcagcctcctgagtagctgggattacaggcacctgccaccaagcccggctaatttttttttttttttttttttttttttgagactgagtcttgctgtgtcgcccaggctggagtgcagtggcacgatctcggctcgctacaacctctgcctcccgggttcaagagattctcctgccttagcctccccagtagctgggattataggcacccgccatcatgcccagctaatttttgtatttttgtagaggcggggtttcaccatgttggccaggctggtcttgaactcctgacctcaggtgatccgcctgcctcggcctcccaaagtgctgggattacaggcatgagccaccgcgcctggcctaatttttgtatttttagtagatacagggtttcaccatgttggccaggctggtctcaaactcctgacctcaggtgatccgcccgcctcggcctcccaaagtactgggattacaggcatgagccaccgcgcccggcctaatttttgtatttttagtagatacagggtttcaccatgttggccaggctggtctcgaactcctgacctcacgtgatccacctgccttggcctcccaaagtgctgggattagaggcatgagccactgcgcctggcctgtgtatttttttgtagagacagggctctcgctatgttgccaaagctggtcgtgaactcctaggctcaagcaatcctcccacctgagcctcccaaagtgctggaattataggctggagccactgttcctggcccccaccctataattaaaagcaaagtggctgggcgtggtggcttatgcctgtaatcccagcactttgggaggccgaggcgggtggatcacgaggtcaggagttcgagaccagcctgaccaacatggtgaaaccccgtctgtactaaaaatacaaaaattagctgggcatggtggtgggtccctgtaatcccagctactcaggaggctgaggcaggagaatcacatgaacccgggaggcagaggtttcagtgagctgagattgcgccactgcattccagcctgggcgacagagtgagagtccgtctcaaaaaaaataaaataaaaaaaagcaaaggtcattatgttaagtgaaacacgccaggctcagaaagatatatactgcatgttctcactcatatatgggagctaaaaaagttgatttcatggaagtagaatagaatgacagttaccagaggggctggraaggctagtggggtgtggagagattaggagaacttggttaatgggtacaaacttacaattaaatagaaggaataagttatagtgtttgatagttcagtagggtgactatagttaacaatattttattgtgtatttcaaagtagctagaagatttgaaatgtttccaacacaaacaatgataaatgttgtaatagatatcctagattctctgatttgatctttacacatcgtctgcatatatcaaaatatcacatgtattccataaatatgtacaattactctgtatttttaaaaaccaaagcatgggaaaatatatcttcaattccaatttccttttggaactagatacccttcggaaaaggtgctaagagcccacatcaccctggtttagcttgttgtacaggttattagaatagggaaggaacaccttgggcccaggagtgagtgtttcttcttttacaggtgtaactaaaaaagctagttggtctaacttgtgtgtctttgtcctataagcctctgcaggtgtgcgagcaggattgcttctgcaacaaaagcctccacccagccacwtcttgkgaaaagaatggccacttcttggggcacagtctttttcatgctggtggtatcctgtgtttgcagcgctgtctcccacaggaaccagcagacttggtttgagggtatcttcctgtcttccatgtgccccatcaatgtcagcgccagcaccttgtatggaattatgtttgatgcagggagcactggaactcgaattcatgtttacacctttgtgcagaaaatgccaggtaagtgcaactgggacccttagtagagtctgtaaatccacactttagcatctcctcccagaaacaaatatgctgagagtttattatgtgaattacagaatctcacacctagtggatgtctttcttcagagaactttggactacaattgaacatgtggtttatttatttatttttatttatttgttttgtttttattttttaactttttttttgagacaaggtcttgctttgttgcccggtctgtagtgcagtggcatgatgacacatcactgcaaccttgacctcctgggctcaagcagtccttccacctcagccccctgagttgttgagactacaggcttgtgccaccatgcccagctcatttttaaatttttttatagagacctgctcagrctggcctcaaactcctaggctcaattgatcctcccacctcagcctcccaaagtactgggattataggtgtaagtcaccatgcttggccagaacacatggtttaattcaatgtgaaattagaagagagctgggctgtctgtagtctgaaacccatgtgttcaaaaagaatagttataatttgttcttcctctttaaacatgggatactccagggatccataatattcagaatatggggagtggttttgggagaaggatcacatgagaatttcactgccatccttggacatgaggctaggaatccctgaagattaactttttctgaattgtcagtgttttttcctcaggtcacttatggagcctggggaaaggtggaggagttaggtgtccaccagagaaatggtagcagaaatggaccctcagaggttgctctagtccttctttccagtactcctgcaagacattcctcacaactaggatcatttgggrtaacttcagggaagtcataggaaaacttacagagacagagcccagcatctgaagcagcctaacttttggtaaccagctctctcttctgttttgttccatggacaaaataggacagcttccaattctagaaggggaagtttttgattctgtgaagccaggactttctgcttttgtagatcaacctaagcaggtgagtttcttatgatttgatgtttagattctcaatgccttgataacttgaccacaccactgctgttaaatatttcatgctattcactaatgagattgagatcatgtgtgagatcagctttctctcctcagctaatctcctggataaaattaattacatttcccacgctcatgagggctgggtggaagaaggctagaaaattggttgtggtaatgcaaggatgacactagcttttaagagattactccctatgtacttactgtttaaaattttgagttgaagccatcagttgtatttgttcatgtaagcgcagaagataaacatgaagttctgtagggtatgatgtataaacatggcagttgaaggcatggtgagcagtgaattccatttcagagtgccttgatgcaggatggaaccatatctatacttgagaaattaggcaacaacccatgatgacaaaaatctttggtggtagaagatgaatagagagtttgtggcgactatatttcacatttgagcatctacaacatactacatcctatgtgtctgaggccatgttgaaataaaatagaataatgcagaatgttaaacttggggagcaaatgtaaaggtatttattgttcattgtcacaagaataatcattacccaaatgcttgatgttaaaaatgatttgagtttggagaactgagaggatatatggatatatatacattttcttctttttcttttttttttttttttttgacggagtatcactctgttacccaggctggagtgcagtggcctgatctcggcttactacaacctctgcctcgcgggttcaagcaattcttctgcctcagcctcccgagtagctgggactacaggcatgtgccaccatgcccggctaatttttgtatttttagtagagacggggtttcactatgatggccaggctggtcttgaactcctgaccttgtgatccgcccatgtcagcctctcaaagtgctgggattacaggtgtgagccactgcacctggccccgagaggatatattttcttagttcagtarcacatggatagcaaatctactagaaaaatttggagctgttcaaaagaaactaccatcagagtaaacaggcaacctacagaacgggagaaaatttttacaatctacccacctgacaaagggctaatatccagaatctgcaaagaacttaacaaatttacaagaaaaaatcaaacaaccccatcaaaaagtgggcaaaggatatgaacagacacttctcaaaagaagacatttatgcagccaacggacacatgaaaaaatgctcatcatcactggccatcagagaaatgcaaatcaaaaccacaatgagacaccatctcacaccagttagaatggcggtcattaaaaagtcaggaaacaacaagtgctggagaggatgtggagaaataggaacactcttacactgttggtgggactgtaaactagttcaaccattgtggaagacagcgtggtgattcctcaaggatctaggaatagaaataccatttgacccagccatcccattactcggtatatacccaaaggattataaatcatgctgctataaagacacatgcacacatatgtttattgaggcatcattcacaatatcaaagacttggaacgaacccaaatgtccatcaatgatagactagattaagaaaatgtggcacatatacaccatggaatactatgtagccataaaaaaaggatgagttcatgtcctttgtaaggacatgtatgaagctggaaaccatcattctgagcaaactgtcgcaagaacagaaaaccaaacaccgcatgttctcactcataggtgggaattgaacaatgaggacacagggtggggaacatcacacaccggggcctgtcgtggggtggcgggagcrgggagggaaagcattaggagatatacctaatgtaaatgatgagttaatgggtgcagcccaccaacgtggcacatgtatgcatatgtaacaaacaaacctgcacattgtgcacatgtaccctagaacttaaagtattaaaaaaaaataccagggtcaggggtatatttgaatagtaaataaataaattaattaattaaaaataaataattaaaaaagaaaaattaggagctgttgaaagcaactatattattagaaactgacttggcatttagaaaaggtgatcgtgttgtagttgctaacaataatgatcaaagggcagtcagatatcagaatagaagttcattcagggaaatagtggatttaaaataatggttttcatttattacaaattgagcatctactgtgtgccatatgatgatacaggaatragcctgacatgttctttaggagatcatcaaaagtatggcatcattactgccacagcttgtgtggtaaccacatgcactatgcctcatgcacacaacagtttagtggtggtaggcagcgtatctaccatcccacacttgaggaaaccaagtcccaacaaggccaagtgacctaagttaggccacagggctagcaagcaagtcttctgactctaactcctgttttcttcactctaccatcctaaagctgatttatatataagaaacatgaaataatcagccaggtgctgtggcgcatgcctgtaatcccagctactcaggaggctgaggcaggagaatcgcttgaacccgggaggcagaggttgcagtgagccgagattgtgccgttgcactccagcctgggtaacaagagcaaaattccrtcttaaaaaaaagaaaaagataatcaactaaaatgatcacaatataaaagaataatttggccaggcacggtggctcatgcttgtaatcccagcactttgggaggggtgaggtgggtggatcacttgaggtcaggtattcgagaccagcctggccaagatggtgacaccctgtctctactaaaaatacaaaaattatctgggtgtggtggcatatgcctgtaatcccagctacttgggtgactgaggcacaagcatcgcttgaacctgggaggtggaggttgcagtgagccaagatcacaagatcatgccactgcactccagcctgggtgacagagcaagaatgtcccaaaaaaaataataataataataataattttttattaggactgtcaaaatgaaatggattctccttttttttttttttttgagatggagtgtcactctgttgcgcaggctgtagtgcagtggcataggcttgactcactgcaacctctgcctcccaggttcaagcaatgctcttgcctcagcctcccgagtagctgagactacaggtgtgtgccaccatgcctggcttatttttgtattttttagtggagatggggtttcaccatgttggtcaggctgatctcaaactcctgacctcaaatgatccacccaccttggcctcccaaagttctgggattacaggtgtgagacaccactgcgcctggcctggattctccttcaaagcggcccacttctctaggtttctcctgctayagagcagagagaggttggagccctatgccacctccctcttcttgctcccacaaagtatgttgacagaatagaccagtgccagccactaaatggatcgttcatcagatgaacgggttatctcttttgaagggtgctgagaccgttcaagggctcttagaggtggccaaagactcaatcccccgaagtcactggaaaaagaccccagtggtcctaaaggcaacagcaggactacgcttactgccagaacacaaagccaaggctctgctctttgaggtaagttttaaaactgcatcttggatcattctgcccttttccctatatgaatactttatgagtttttagccttttggaatgtgaccactaccttcagtattccaccactgccaaagcattgtgatgactctgaccacttgttatagctagttgtttacatttttaactatcactcttaaatgtatagagcttttcctaaaaaatttaaagtactttctatctaggatattcttcattctttttatttttatttttattttttgagatggagtctcactctgtcacccaggctggagtgcagtggcgccatcttggctcactgcaagctccacctcccaggttaatgccattctcctgcctcagcctccggagtagctgggactacaggcacctgccaccacacccgactaattttttgtatttttagtagagacggggtttcactgcgttagccaggatggtctcgatctcctgacctcgtgatctgcccgcctcagcctcccaaagtgctggaattacaggcatgagctgctgcacctggctgatattcttcattcttttagatttttaaagcagaatcagaagtcgtttctaatcaactttattaagataaacttacatacaataaaatatatctattttaggctgggcacggtggctcacacctgtaatcccagcactttgggaggctgaggcaggtggattgcctgaggtcaggagtttgagaccagcctggctaacatggtgaaacctcatctctactaaaaatacaaaaattagctgggcattgtggcgcacgcctgtagtcccagctactcaggaggctgaggcaggagaatcgcttcaacccaggaagcagaggttccactaagctgagatcacaccactgcactccagcctgcgcaacagagcgagactgcatctcaaaaaacaaacaaacaaaaaattatatattttaggtgtacagttaaatgagttttgacaagaaatagaaatttcctcatgctcttttatagtgagtttccctcacccctgaaaccaaccaatcactaatttgcttcctgtcactataagttttgcttattcttttcatataaatggaattatacagtttttatttttatttttgtatatctggcttttttcctctcagcataaagtttttgagaagaataatggaactttaaagtttgattttttttttttttttggaaacagagtctcactctgtcttccaagcttgagtgcagtggcacgatcttggctcactgcaacctccacctcccaggttcaagcaatcctcctgccttagcctcccagttaactgagattacagttatgtgccaccacacccggctaatttttataaatttttttgtagacatagggtttcaccatgttgcccaggcttggtttcaaactcctgagctcaggcagtccaccttccttggcctcccaaagtgctaggattataggaacaggcatgagccaccacgcctggtgaagtcatatatatatatatacattttttttttctgttacccagactggagtgcagtggcacaatgttggctcactgcaacctccgcctcccaggttcaagcaattcttctgccacagcctccagagtagttgggattataggcatgcaccaccacgcctggctaatttttgtatttttaatggagacagggtttcaccatgttggccaggctggtctcaaactcctggcctcaaactccacccaccccggcttcccaaagtgctgggattacagacgtgagccactgcacccggccctaagtcatatatttcaactcccttcttattcagatcaaaaatttaagtatagagagttttgttaaattcagtatttttatttttattcttatttatttatttatttatttattttttgagaggcggagacttgctctgtcgcccaggctggagtgcagtagtgcgacctcaggtcactacaacctctgcctcccagattcaagcgattctcctgcctcagcttcccgagtagctgggactacaggcgtgcgccaccactcccagctaatttttgtatattttagtagagatggggtttcgccatgttggtcaggctggtctcaaactcctgacctaaggtgatctgcccgcctcagcctcccaaagtactgggattacaggcatgagccattgtgcccagccaaactcagtatttttaaattttattgtatatatttgttatgcaataaacatgtaagttaataaaatttaaatttcatgttgtgaagaatataagcagaatctcattataacaaaaaatcaggctcggtgcagtggctcatgcctgtaatctcaacattttgggaggccaaagcaggaggattgcttgaggccaggaatttgagaccagtccagacaacaaagcaagacccctatttctacaaaaaaaattaagtcccggtgtggtagctcatgcccaaaatcccagctctatgggaggccaaggcgggcagatcacctgaggtcaggagtttgagaccagcctggccaacatggtgaaaccccgtctctactgaaaatacaaaaattagctgggcatggtggctcacgcctgttggtcaactactcaggaggctaaggcaggagaattgcttgaacttgggaggcggagcttgcagtgagccgagatcacgccactgcactccagcctgggcaacagagcgagactctgtctcaaaaaaaaaaaaagattgaaactgaaaatcatagtaggccaggcgcggtggctcatgcctgtaatcccaacactttgggaggccgaggcgggcggatcacctgaggtcaggagttcaagaccagcctggccaacatggtgaaaccctgtctctaataaaaatacaaaaattagctgggcatggtggcaggcatctgtaatcccagctactggggaggctgaggcaggagaattacttgaacctgggaggcagaggttgcagtgaaccaagatcgtgccattgcactccagcctgggtgacaagagtgaaactctgtctcaaaaaaaaaaaaaaaaaaaatcatggcaaaaaaggactctgtattacaggccctaaatccattttcctttgactgtcagtacagaggacttaagtcacttatccaaggatgagcagcctaatatgtctctgtgagaacctgaatcctgattcctgatttattcctcatttattcaacataagagtgcttactgggccaggtgcagtggcttacgcctgtaatcccagcactttgggaggccaaggcgggtggatcacgaggttaggagatcgagaccatcctggctaacacggtgaaaccccgtctctactaaaaatacacaaaattagccaggcgtggtggtaggcacctgtagtcccagctactcgggaggctgaggcaggagaatggtgtgaacccgggaggcagaggctgcagtgagctgagatggcgccactgcactccagcctgggtgacagagcaagattctgtctcaaaaaaaaaaaaaaaaagtgcttactatgtactgggtactggtgaagttactggaatacattcagcagggaaccaaaaatacaaaaatggtctttgcactcctgtagcttacattctacttcaggaagacagaaaataaacatctgaacaagtcaaaagaaagttatgttaggttctgcaggtgctatggagggaaaaaaaaaaagcagggaaaggcaggtagggaatctgttgatagtgtgggggaaatgctattttaaataggacagtcagggaagaagtctttgataaaattcagttgatcagagatcttagggggatgaagaagcaagttacacaagacatttgtgggaagaatattccaggctaaagaaacagcaggtgcaaaggccagaggcaggtatgtgcttggtatgttaggaacagcatccaggaggtcagcatagctggagaggaaagagcgatatgagaggtaaggaggcggtaacctcagagaggcagggttaaggggtgtttatcatgtaggatctcaaatgccagtgtaatcactttggctttttctttttcttttttytttttgagactgaattttgctcttgttgcccaggacggagtgcaatggcgctatctctgttcactgcaacctccacctcctgggttcaagtgattcttctgcctcagccacccaagtagctaggattacaggcatgcgccatcatgcccggctaatattctatttttagtatagatgggttttcaccatgttggtcaggctggtctcaaactcctgacttcaggtgatscgcccgcactttggctttttctataagaaggaagccactggaaggttttttgttttttggcgttttgttttgttttgttttgttkgagacagagtctcactcttgttacccaggctagagtgcaatggcgcgatctcggctcactgcaacctccacctcctgggttcaagcgattctcctacctcagcctcccaggtagctgggattacaggtgcccaccaccatgctaatttttttgtatttttagtagagatggggtttcatcatgttggccaggccggtctcgaactcctgacctcaggtgatccacctgcctcggcctccaaaagtgctgggatgagaggtatgagccaccatgcccggctgccactggaaggttttgagccaaggaaacacatgatttgacgtccatttttaaagcaccgttctggctgctgttttgagaacaaactgtaggatgggggagaaaagtggagaaggcaagagcagaagctctcttgctgtgcttcatcctgttcacttatctgtctttaaaagtttgtttatatataacttaactggtttttcctggttgaaacaggatccagaggtcattatgtggtatgtttcatccatcagaaatgagaacagcaaacagactagcgttcttcctatcctatttggagaattcttttttctttcccttgataattatataaacataagacattaacacccatatcaatggtctgtattatggagaggcaagatgtttttgcaagatcktcattcccatctcctgaaacaggattccttaagtctagatctggagtctccccatgctctagagaccctagccatgtgccagaatctgacaggagctggtagcagagtacctcagcccttaggtgtgaacttcaccacagcaggttcatgtcagctcatctaaggaatggagtgggaaggctcctcctagtttccagtgtatgtccaggtagagtytatcaggtttaaaaagttacaggatcctgatttgagctggcagggttaaatatatgcctttccataggtccagttcacctatacatttagatggtttggtttagctttacttaaagtcaaaggaatctctgtgtttgtgtttttgcaagaaactggtaatggcttgcctagtttcttctctagtttcttagggcaaaggaatgagttttgccaaaattttatctaggaaaaatggagtagttttctaagtcttacaggacactgtcaaaatatggaaatctattttattgccttagggaattctttttttttttttttcctttttctctaggtaaaggagatcttcaggaagtcacctttcctggtaccaaagggcagtgttagcatcatggatggatccgacgaaggtgggagaggtgttgatatgcgttccagggggagaggggcaggatcagtgaaagatctaactaaaggaactggggccaggaataaacagaaggaatgagatagcaggaaatagaagacagggagaagggaacatgtgctctagacatggaatttagagaggaaaaaaaaaaaacaaggttggggccaggaaagagaaaaaatgctctgggatctaatccttgtctttctttctttttaggcatattagcttgggttactgtgaattttctgacaggtaatacatcctcaagtttatctttagagcttaactagcttttacatgcatagtcagaggagtaaaagccttttctttcattctgtattgtttcttcttctttaaaaaaggaaaagaggctgggtgtggcagttcatgcctgttaattccagcgctttgggaggctgagttgggcagatcacttgaggccaggagttcaagaccagcctggccaacatggcgaaactccgtctctaccaaaaatacaaaaatagctgggcatggtggtgtgtacctgtagtcccagctactcaggaggctggagaatcacttgaacccaggaggcagaggttgcagtgagctgagagccgagattgcgccactgcactccagsctggatgatagagcaagactctgtctccaaaaaggccttccaaaaaaaaaaaaaacacctgccttgaaggcctctgctgcaacaagagtccttccgagttgacattcacctgcagccttggggctggggagcagtggagtatgtatggaataccttcagtgtatgataagagcaagagagacaagtgttgggctgcccaggatgtcgaggctatttagagctggctctcatttgacaggtcagctgcatggccacagacaggagactgtggggaccttggacctagggggagcctccacccaaatcacgttcctgccccagtttgaggtgagtcatttaatgaagatctggttagaagtgcacttggcaggcgtatcatggtgccaagaaagaggcgccccattttcagccagcagctctaccacgcttaggcagagtcaagtcaattaataactaggtgaatgttcccttgccatctcactgttcagaatcccttygtttcctcaagcctagtgagattagccccttaatctgtcttcatctctgattttttgctgggagggacgggtggtggtgtgaacatcttcaggtaattacagatcctgaatagtctttttgctttttctgatttgcagaaaactctggaacaaactcctaggggctacctcacttcctttgagatgtttaacagcacttataagctctatacacataggtgaggacggggacagggaagaagaatatttcatgttgtatgattctcctaactttccaaagcattctcaaatctgttattgtatctgattagcaaaaacaaagtctgtgccaattccctaaggcctatcaactgaaasccggtccacttacaaagccggaggagcctaagaggcttctccattcttggcctcaaaagcattaatatatgacttaagagtcaaaagttttcggctgggtgcagtggcttcatgcctgtaatccctgcactttgggaggccgaggtgggtgggtcacctgaggtcaggcgtttgagaccagcctggcaaacatggtgaaaccccgtctctactaaaatacaaaaattagctggatatgacagcgcacwcctgtaatcctagctattcaggaggctgaggcaggagaatcatttgaaccctggaggcggagattgcagtgagccgagatcacaccactgcacttcagccrgagcgacagagcaagactcagtctcaaaaaaaaaaaaaaaaaaagaatcaaaagctttctgtagggagaggacacttcaagaaggctcaggcaaagctccttgccagctcctttgagctggccttcagaggttcagaatccagcctggaatgtgatcccagttggggctaggagctaagctaaagagagcttttctgggaatggttcctagtgtgggaccctaggaattgtcactgtctctggcctttgaatgataactgtggggaattcttactgcatagccttgatccaaactgtgcagaaattaccccttgttgaccacaggagatgaatatgtcacagacagaacaaggttttcatctttccagagggacacaggaacaatgttacttttgaaggaggtagctttaggctagagaacttcaggaccagcatgaaattagtcaatcctgtattttacagttacytgggatttggattgaaagctgcaagactagcaaccctgggagccctggagacagaaggtttgtctgggtacctgtgctggggggggatggtgagggtgacacagatactccgcttgcttcttcccttccttgatagccattctatgraggaaaagattatgttgaattgggaggcaaatgttgtataatggacctaataatggcaaactccttttctagtttataagttcagaagttttgatgtatattattagccatttttagaatgaggtctacttgttcaggggtaacagcctatgtctaggcagctgaagtgtctgcagaaatcccaggctttamgaatacattcagcaggagcttgctcaagccctgagctttacattggaggcacaggaagcagagtctgttctacatgcaggtggaacaacagagtaactccattgatctcttcacaggtcaggcagaactgggttcagtcccagtgttgtgatatgaggcaagtaacctrtctgtgcccctttcctcacattaaatgagaatttgcatttaaggcactttgtacagtaatctgttattgggatgacatctattttgcatttcagagtatacaaaacatcttcaagtatatttaattgaagcctctcagcaaccagtgaggaaggtagcatagcatttctttcctgtttttataaaggtggaaagttgctgtattgaaggttttggatctctttgagatgtgatgaaagccatggacccctctgacaaaagcacatatgcatgaaaatttgcttctggtttcagggggttcaccaaccccacaaagcctatctttgaaccctgagttaaggattcctgtcacaggatgttgtcatggaattaatttcataggattttaaggcccagcccccawggtgattcttttccacctcactggcttcttgcttgccttcctccctctctctcacttacttacctcttaccttgtgccctggattctttcagggactgatgggcacactttccggagtgcctgtttaccgagatggttggaagcagagtggatctttgggggtgtgaaataccagtatggtggcaaccaagaaggcaagtgatgttttttcactggttaaagttacgtttacaatggaagctctggaaaagtcccatgggaaactttttccagaactcaagagaagcttatcttgttgcagggacttattccaaagatcttggcatgcctccraggactaatgtgaagtgacagtgaacaaagcagctgtcattctgcatcagccaagtgtcatggacccattagatacctgcccttagccaagtgctgtggtgcacatctattgtcctagctactccaaaggttgaggcaagaggatcacttgagcccatgagttcaaggctatagtgcgcaatgccactgcactccagcctgggcaacagggagaccctacctcttacaaattaattaagaagcatattctaagcctaggtctaatgcagcagtgtgaaascctgtttagttaatggttagctatttaaattatagtaaaacttaaaaccaagacaagaatgattcatcttcttataaaaggtatatacctgaatatcaaggaatgaacctgaattcccagtgaaggaagcaggcgagccctttagctacttgcttacaaatgctatggaatgtaatgctaggcagcagcacaaggttggccatgatctggtgaatacagattaggcaggagagcggccatggagaaacagactggtgaggctgcagacgtttgctcatctttgttttgacgcctcttgtcccaagcctcagccttctcctgctttccttgaccttcctgctgttccctcattgtctccagcagcctgcctcagagagtgtccccttcccccagcgtcgttctcaccttacccctgtgcacctttgcctggcaggggaggtgggctttgagccctgctatgccgaagtgctgagggtggtacgaggaaaacttcaccagccagaggaggtccagagaggttccttctatgctttctcttactattatgaccgagctgttgacacagacatgattggtgagttcaccccaggtgtcagtccagagaggaaggtggatagggctgtggtggggaaggtcaaggagaaagagcacttgaggtgctttgtyggggtgattacccacctcttttctagtcactcgaacaaaagggtggaaatgacttagagtcttttggaggtgagagatgaccaaaacaactatatgaggtctttttttttttaacatgtttattgaggtataattggcatacaataagtgcacatttaaagtatacaatttaagttttgtcatgtatacacccatgaatccatcagcacattgaagataataaacatattcaccacaaaaagtttcctcctgtctctttataacttttcttcttatcacaaaagcagtgtttttgcctaactgtgaaagtatatgtacctgatctgtcatggcctgagagagatgaattaatttcctattattgtgggggttttgttgttgttgttgttttggttttttgtttgtttgtttgttttttgagacagagtctcactctgttacccaggctggagtgcaatggcatgatctaggctcactgcaacctctgcctcccgggttcaaccgattctcctgccccagtctcctgagtagctgggattacaggtgcctgccaccacacccggctaattttttttttaatagagacgaggtttcaccatgttggtcaggctggtcttgaactcctgacctcgttatctgccttcctcggcctcccaaagtgctgggattacaggcatgagccaccacacccggcctattgtgttttatgggtctgttttttccattgtggttaaatatacataacatggaatagattgtaaataagtaaattaggttgcatagattacattatgtacatgtgtatataatgaatgaatgaatgaatttccttatgcttccttgaaggcgttttgatatcagataatcttctgttttatttcagattatgaaaaggggggtattttaaaagttgaagattttgaaagaaaagccagggaaggtaagtgtcaggggaagcccttgaaggtaagcctgtgagactgcctgcctactctagtgacctaaagtgacctaaagcacctcagtcagctcagaaggcctatcagaaggctagtttcctttctgagtcttccagtctttgctaaaagttaaaagcattgggtggtagccaggcatggtggcacgcatctgtagtcccagctactcagggcgggaggattgcttgaggccagaaattcaaggttatagtgcactataatcacacctgtgaacagtcactgcattgcagcttaggcaacatagtgagacctctgtctctaaaaaaataaattttttttcagctttatgcagcatagaattatgggcaagaatatgggaatacaagaggttttaggaggccgggcacggtggctcacgcctgtaatcccagcattttgggaggccaaggtgggcggatcacctgaggtcaggagttcaagacagcctggccaacatggtgaaaccccatctctactaaaaatacaaaaattagccaaggaaggtggcaggcgcctgtaatcccagctactcgggaggctgaggtaggagaatcgcttgaacctgggaggcagaggttgtagtgagccaaggttgtgccactgcactccagcctgagcaacagagtgagactccacctcaaaaaaaaaaaaacaaagaggctttagggctttagggaaatggtraagaccttttttttccttctacatttcttgctttcttttttaaattgaaatagtgttatcagtgttaatgaaacactaagcatcaaaagacatggtaaatagccacagaggcttccttgagaggatcaaaactaccaagagagctaggcacagtggttcgacctgtagtctcagctacttgggaggctgaggcaggaggatcgtgtgaacccaggagcttgaggctgcagggagctgtgatcatgccactgcactccaccctgggtgacagcatgagaccttgtctctaaaaaaaaaaattaataaaaagtttttaaaaattaaaaaataaaatacaaatgatcttatcgagtagcccacagtagggttaaatgatatttccctgtcttctgggcctcaccattaataatagataagggatttagaactaagcccccacaataggtcatagaaacttagcaaataaactagagcccatgtaaatgtgaatagataatcataccagagatgtgcaagttcttcagaagctgcggtcttacagaggcagtcagtgcagtctagtctctgagatgcctaagcattaaccaaagggagacttctgctttgcttattcttcttctccccctaccttttttttttgagacagagtcttgctctgtcacccaggctggagtgcagtggtgagatctcggctcactgcaacctctgccttccaggttcaagcgattctcctgcctcagcctcccgagtagctgggattacagyggtacaccaccacgccctgctaatttttgtatttttagtagagatggggtttcaccacgttggccaggctgatctcaaactcctgacctcaggtgatccacccgcctcagcctcccaaagtgctaggattacaggcgtgagccaccgcgcctggcccctattccacttctttctaagagaaaatcctacacctctcagttagttgcaaacttgagctccactgtttactctctctttcagtgtgtgataacttggaaaacttcacctcaggcagtcctttcctgtgcatggatctcagctacatcacagccctgttaaaggatggctttggctttgcagacagcacagtcttacaggtaagagacaggacaccagagtctcataacagccctcttttgtgggggttgagaaggagtaagagcttgttcagtaatcagagtagctagaagtgaaattatgaggtatttttgtttgggctatggacaaggtactgtgctgggcaccatgaatgtgggaaattatctcaatgcaatggtagcctccgagtgtattaccaggcaagctatygcacaggtcacagaacagaaagactagcagcccaaattaagatgccaagtcacatggtttatttatttatttatttatttatttatttattattatttttttgagatggagtctcgctcttgtttcctgggctggagtgcaatggcatgatctcagctcactgcaaccttcgcctcctgggttcaagcgattcttctgcctcagcctcccaagtagctgggattacaggcatgcgccaccactcctggctaatttttttgtatttttattggagatggggtttcactatgttggccaggctggtctcgaactcctgagaactcctgacctcaggtgatccgcccacctcgaactcccaagtgctgggattacaggcgtgagccactgcacccggcccacatggtttattaaatcagtttagaactcagggtgagaagcaaggggaaagagttggagaggtgaacacagaagacacggtgcaagcaggatgcaagtgccacactctctgaatcttgggttccatttgtcctaggtttatatgtcctgcctgtctctgctgctaatagagtggttacacatactagagctgaagttcggtcatgggagcacaaagacaaaaggtgcctgaggccaccacacaaacttgccctatttggagaggccccaggggcacacacacatggccatttgcattagctcagtcattagcctataagatgggttttctttggcagaggacatgagagaccaagagggtgtcaccagtgagtggcttatttaaggcctcatgaacactgaatgcctcatgcatatgtaatgtgtcatatatatttcatgtgtgcctcgtatatttaatgcctcttgaatcttaggtctttctttgtcctcctgtctstctccatctgtttcagtacctgcaggctctactttatctgtagtaagttatttatccccagttttgggcacagtgtctaggctctattacatcaggtcaacacagaacaatcaactggtttatagacttttytggtggtggtagcatctttatccaacaaaaacttatgtagaatatcagtaatacagccgggcctgatggctcacgcctgtaatcctaacactttgggaggctgaggcgggcgratcacctgaggtcaggagttcgagaccagcctagccaacatggtgaaaccccgtctctactaaaaatacaaaaattagccgggcgtggtggcaggtgcctgtaatcccagctacttgggaggctgaggcaggagaatcacttgaacctgggaggcagaggttccaatgaggagagatcataccattgcactccagccttggcaacaaagagcgaaactccgtctcaaaaaaaaaaaaaaagagtatcagtaatataaaactggtaaaagtggaactattctggttgaagcagagattgggggcctgaaactcctctatcatttggcctccctttttccttcgaagcatttctaagaaacccctaaaattctgaagaaaacaaattgataaaccgataaacactaatctaatcctcttcttatatagttgaggaatttgggtctaaagttttgcccaaggtcactaagctaattgagatatgtactggcttagaatgtcttaagttccctgtttgattatttttttcttttctttttcttttgagaccaagtttcgctcttgttgcccaggctggagtgcaatggtgcaatctcagctcactgcaacctccacctcccgggttcaactgattctcctgcctcagcctccgaagtagctgggattacaggcatgcgccaccatgcctggctaattttgtatttttagtagacacggggtttcaccatgttggccaggctattctcaawcttctgatctcaggtgatccacccgcctcagcctcccaaagtgctagaattataggcatgagccaccactcctggccttttttgttcgtttctttttttttctttttttttttttttttgagacagggtcttgctctgtcacccatgctggagtgcagtggcatgatctcagttcactgcaacctctgcctcccgggttcaagtgaccctcccacctcagccctctgagtagctgggattacaggtgtgtgccaccactcttgtctaatttttttgtagagacggggttttgccatgttgcccaggctggtcttgaactcctggcctcaagcaatccacctgccttggcctcccaaagtgccaggagtacaggcatgagccactgcgcctggccccatgtttggttattattagtgcttaggaagaggcacttgcttacatagtaggagttgagaagcttggtttgttctttcctacccctagatctattctcacctcctgaccatgctctttctgccacatctattatcattacaagttgccttatctgaaattagtgaatcagaaaataaagcaggggatactttgtgtagtttcaacgttagggaaagttcagaatactgtctgtctaaactatctctctagaaggcctgatgggccacaacctgggccagaagcattcagttcagatatgagaatggtgggtgtaggggcaatggccaatgggccatggccrgaaggaaattgttacagagtagtgggragcctgcaaagactggcttctgtccgttttgccttggtttgcccatgtggatattctttgccaatattttctgcccaagagctgtgcttgctagagttggaaactggatgaaaaggtgaagactttttttcttctcaacagctcacaaagaaagtgaacaacatagagacgggctgggccttgggggccacctttcacctgttgcagtctctgggcatctcccattgaggccacgtacttccttggagacctgcatttgccaacacctttttaaggggaggagagagcacttagtttctgaactagwctggggacatcctggacttgagcctagagatttaggtttaattaattttacacayctaatgtgaactgctgcctaaccactcaagagtacacagctggcaccagagcatcacagagagccctgtgagccaaaaagtatagttttggaacttaaccttggagtgagagcccagggacaggtccctggaaaccaaagaaaaatcgcatttcaaccctttgagtgcctcattccactgaatatttaaattttcctcttaaatggtaaactgacttattgcaatcccaagacccatcaatatcagtatttttttcctccctatacagtgccctgcccacccttatctgcacccacctcccctgaaaaagagagaaaaaaaaaaacctggttttgctttccatgtataattcaacaacrcaaaatgggaccatgtcagaatctgtatgatcctattctgtgttagctccaatcagccagctgagagccatcctaaatattaataggatgagagagtaactcctaactgtgcataaattacagccttaagaaagaaggccacccggtctctggggacatgttttgggagggtgtggctgcctcatatagcctacctttgctttaatcagcattttatcagtcaactctgggattaatgaacatatccgactttatgggtatgtgtatattcagtgccagtaccacctcccaggctaatgtgttaacagtgttttctatgattctaaacttgttttctttgtatttctaagaaatacaactaggccctaacttttggtctgtggtcagaggtcagtgtctgtgctattccaggatctattatttcagtttgcccttttattctctccgtttgtaacagtaccttcctgtcctggtccctgatcactttagctaatatcctttgaattatttatctagttcagagtttccaataccgttcctgacaaaaccccacttggatttggttggctctctcagcccacatcagtacagtggaccaacatttccagggagaaccatatttaatgtccctcatgctctctttttgaatccaagtgctcagagctcttgactgtgaattatttaccccaaattcattatcttgcactyttttttgagatggagtcttgctctgttgctcaggctagagtggagtggcgcaatctcagctcactgcaacctccgcccccaggttcaagcgattcttgttctcagcctcctgaagagctgggattacaggtgcccaccaccattcctggctaatttttgtatttgtagtagagatggggtttcaccatgttggccaggctggtttccaactcctgatctcaattgatccacccgcttcccaaagtgctgggattacaggcatgagacaccgcgcctggccttatcttgcactttcaacataatcatccctgcttctcatctgccctgcagtgctcttggacctggaagatctccctgtggtctggcccctttgccttggttgttaacctccagcttctttgcaggagtgtatttccccaaaacttgtggctttcacagtagactccgtttccatcctctctctcacaaaggatgttaagtatgcctggccctcacacagtccatgggaaaccttatttttaacattactccattgagtcaataaatatttaccatctgctgtgtgcaagttactaggcaaatttctgtatccttgtccctaaaattcttgtctttaaattcattgtggaatttctttagacttcacactgacttttattactaaggtcacctttataccaactgccttcctcaaaatgcttataatgaaataacagaatcttgagttggaaacagcccaaagaaataatccaatgttgtactcagtgcagaattccctagaatttctaacaggttgtcattcagcttctgctaagccatgttcaaacagcttattccatttggaactgcactgatattaaaaaaaattccttatattgagctgaaatctacctatcttctaagtggtcttagttctgctctaatctctccttccaaaatctttggatcttttgaaaaaagttcctcccaagttcttttataagtgacatgacttttagaccccttcccatctttgtcaacaaaagtagggtgccagaccagtcacagaacactaaatgtcatccatgtttccttcagtagaaaccagcagttttaaaagaggtaagctgtgttcactaaagactgttccagcttgacaaatgcagagatataagtctctggtctttaatcactgtgggggccattttgtaaaacacacatactgtccagcagactcctttggtcatcccaaatacctcygaactccagggaakatgcattctaactccacgaacttacctattttgttaaccttgattagaccttctggagaagtaaccaatttgtccatcttaggagcaatttggaatgagagtttttatttttttctgtaacgcccatcctgcctgcagtagaccctttgggcttaagaggtcctacagattctaatagtttcctctttgtagatrtgttaacatatttaaaatacttaggacayggcctggtacgtgacagatggtgtttaacatcattgtcatatgaagaacactctctgtgggccartggaggtgtgccttaaaattcttcatcttgcctgattttgtttgcataacttctggagagtctgtgtcctcctcatctaggccacctttccattttttgtgaaagatgaccttgtccctgcagtctccgccaggagtcacacagcttttcacagcagctgccatctttaattctttttcctgagattccagcaaggttgtgacattgtcacttttttgttctagactcttttaaattttctgcatttgcctgaaaagcacccctgtaagaatagatttctcatggctctaaaaattattcccaagaataccttacttggttcaaaagcagactgtttctcttcatttcatctcaaatcagacttctgggcaagatgttctttagagtaagcaaacctacaacctaaaaatctcttcaagaggcatctctggtcttgtgacragacctcttcaaaaacccacagtaaaactcccctccctccagttgbccaccagtctgccaccaaacatgaacaaattctgctgctaatcggtttcccttgtgatcyggttcctgaggtcttcggatctgtgcaatgaattatttattgttttattaaaccgacagtggtgtcccagagaggaaccataaataaaatggaaatctggtgctgtgataaagtaataactagcattaatgagacctggttttcctttcagaaagtccagtatacctgtaacaaaggttaaagcaatttatatttaatttgcattctgatgttaacatttaaacagcaattctaacaaaaatgcatcgagtctaattcttacctctatcaaaaaacaactgtataaatttatgaccaacattaaaacaaaaacaaaatgtaaattttctctttagaaatgattaactggaaatgagtgagacagcaccttgtgggttttttagtaataaaaagctcttttcaaccaaattgtaagtcttccttcgaagttttttcctttggtctggctaatatacgctcctcacagcaaattatcattcattatttgggtgccacaggcccattaagcaaagaagaaaaagagaattttaatgtaaagtaagtttattaaattaaataagatcttgaaaatatgtatgatgggtcctgggcaggatgttctttttcatcarcgtaatctttctttaggagaggagtactcatttgcttgcaaaggccataatctgttcctggagaaaaaataaaagtgaatgaaactcttaacacagtaaggtgaagaaaataattattgtagataataatcacgtaggtattcttcccaagtgtccttgttttatttcagctaaaaaaagaaaaatatacatacatatacacacgttttagagacagggtctcactctgttgactgggctggagtgcagtggtgtgatcatagctcactgcagcctcaaactcctaggctcaagcaatcctccctccccagcctcctaaagtgctgggattacaggtgtgagccactgcacccatcagaaaaaacatatctttaaatggaagttctcagggatgaaactagtcaagcagcaaaaggagcttaaacatcttcatcattagaaatccctattcatttttttttttcaagagactggtcttaactctgtcacccagtctgagtaacaatgatgtgatcatagcccactgcagcctcaaactcctaggcttaaattatcctcttgcctcagtctcctgaatagctaggactacasgcaygtgccaccacactccctattcactatttttaagccctttttatacatagttattgcttagatgtgggccgtaacacctaaaagcctagcaagtactcttctgcttgtaacccttgggaaggcaaacacataaagataataattttacagccaagaaaattaattcaaagaaattaagagctgtgggccagccgcagtggctcacgcctgtaatcccagcactttgggaggccgaggcaggcagatcacgaggtcaggagttcaagaccagcttggccaacayggtgaaaccccatctctactaaaaataagaaaattagccgggtgtggtggtgggcgcctgtaatcccagctacttgggaggctgaggcaggataatcacttgaacctgggaggcagaggctgcagtgagtggaaattgtgccactgcactccatcctgggcgataagaccaagactctgtttcaaaaaaaagcaaaagaaattaagagctgtttgcaaagtcattcctctgagcaacctcttactttgagtggagacactgcatttgtggcctgcaagccccacgtcctgagcaacacaagcggggaggcactggtagaatagagcctttttagtaagtctgtagcagccagaagagcagtgttgtgacgctgtctttctgtttcataacctgtgaggtggctcanggaacctgaagggcagaggaaagattaaatccctaatccaataataaggttttcttccatctcctagcaagccagatatattttatgtccactccctcttgctactrtgggccctgatcttgcctaactatatgacctctggatacttccccatagtayctgaatccttacctaagtccttcccattgaaggctgccrtactgaggtgatgggccaagctggagatatccccaaagcccatgttgacaccctgtcctgcaagcggatggactctgtgggctgcatycctaagaataaagcagagttcaggtgtgacctctggcagcaaagtgagaagggagtggccctgctctgttatcgtcttacccaatgagcgccacccgaggcctgacgtactcagcagcatgtcccaacccaagaggaaacagaactcggcttttggcawccaccctggctacgcttgggggcagctggcgagccgagaccttagtgggcttcagaaggctgacagsatactgcagcatggcaccagctgtgtcgatgaagtccgtgtggtcagcatmactycactgagcagcatcagccacaagacaaacaaggtgaaatgtgagtagcagggaattaaaaattcaataaagaaaccttgtttgtaaccaaagcttaggctaatgctacccaacttgcctacactgatcttgacaagtgataagcccctcaagtgcaaagcaacttctcatcactccccagaggttttaagatctagccaaactgtacatgagctggcccctgcctacttctgagcttcacctttcactagtccccaccctcaataaccacgcaccagccacagtatagctcatcacacagtatccttctacctccatgactctcctctgcttagaatgcccgtctctatttcattaggataacatctcagagcatccagaagacgtcgcctctttttaactcctccagtctttctctgtgtttcccccctgtatgcttccacagcatcctatgcatacttctatcactgtacrgagattgtcatttacggtcttccttacttgactatgaacttcctgaaagcggagactgttctcagtatctccagagcctgctacatagaaaggacaattaatggtgaatgactgcactgcagaggacctagacctgtgccaggaatatatactaaatggcccagagtagggtagtgttcaccatttatctcggaatccatttcagtatgttcagttccctttattcttgttgctactacagagcagtggagtctttggtgtgaaggtagcaggctttgagtgtcatttaggctccaaaagtaatactggtacccatattatccaaaggctgtgtctactccagaattattagtatttgttgagcacctacaatgtactaaagatgttccatggattttacaaaagttctctcattttgaaagtctttattcaaycctgagcagttagtgatactatttacatkttgaacccacayctatctactaagcttactcttaagccccatgctgaaattcgctcggcctttccctaggaatactttcaatgaatcrggcttgaaaggttcaggtagctgcaacctagcagaactgttcaaaataatccaagtgttacagcttcaaaaaaaggccaatgctaaccaccacccaggcagctgtttcagtcagcctaacagcagcccacaaccctcaaaaggttattatttattatttctattgttttgcatttccgtgtrtacactcctccacataatctagaccaagcattatagttacaaagtagaaagggacagctgactggttactcctttttcctgactcaaaaccacctttctggctgggtgcagtggctcacgcctgtaatcccagcactttgggaggccaaggcaggcagatcacttgaggtcaggagtttgagaccagcctggccaacatggtgaaacctcatctctactaaaaatagaaaaattagctgggcatggtggcacgtgcctgtagtcccagctacttaggaggctgaggcaggagaatcrcttgaacccgggaggcggagattgcacagtgagccaagatcgcgccactgcgctccagccyggcaaggatccgtttcaaaaaaaaaaaaacaacacctttctgtatctccccctgcagcacatcatcagctgggtaaattgatactcacaaaggcagagttaacggcatccacaaatttttcctcatccatgctaactagctctgctgcatgttcatkkgacgtggaccaaaccaaggaactcaaggtgtctgagagctgtgtcaaaagaacaccaataccaacggctaagactctgctgcacttggaaactctcaagcataaaaagacaaaaagggaacttacaaacagcctgggcagattcccttgaaaccagaaaaaggctgagagaaagtgaagaggaaaggcttgcatgcatgtgggcggactggtcagaaggacctcttaccgggagcagagcaataggcccagagggaagaaatctctgccaggctacgttgttttctgtggcctgcaacagagaggagaaaagtttctctgtgaagtacctagtgcctatgaataaagtccccagatggcagctcaggatcttacctctgataaatgcagagtagccacaacagcagactggtcatagttccagctcacattctggattccaacagcctgccgtactccggagttgtgaccatctgcacctatctgcatggacacatgagcctgctaagtcttccagcctcttcataaactgcttcagaagtttttctctgctccctaaagtttcctccagctctgattgttgtgtggcaggataattccatcaggcctgcttcactcacagcccctagaggtggagcccctgcactgtcacatcagcctcagccaacagagccaaagctggacatgactgaacaggtgccagccatgagttaaactcagccaggccctcctgatatttgaactagagagcaataaggaaagtttcagtatggggcacacactggagctgaatagttctgatgtagggttaggaatggctaccatgcaaaaagggaagcttgtgagcagaaaggagaaaaatgagaggcaagagatcaatgaccacagactcctcagagggaaagaacagcctccattcccaacactctggtgcctgtcctgtgaggcccagctatctgttatttcacaacctaagacggcccatgagattgctccctgtacaggatttacgatgagaccatctccacttgagctggcctgaataggtactggtcctcataaccaaaagttttgcctaaaattaaactatagcttaaatckaaaaccagagtccctagaatctaggataagatgtagatatacaagacccctagcaaaataagaatcttcaactaccaacaatttggtctggaaggtgctgccatcacctagggtaatrtgaacccaagggctggagtcggccataggaaatggacaaggccaggtatagcgaatggctttgctcctgtagagaaccgtcactcggtctggggaggtcaaaagagaggaaaaaaaattagaaaggtgggccacataggctgaggaaaaagccataactaaacctaaagcaaggtcccaggacagcagtgtcttgtcatttaagattaaaaaaatcagtaattaatgctgtggtctgagctaataaatgacagaagccacagagataactcaatgtcaaaaaaagacattgaagttctcagtgaactctgtcagaggcactctttcttactgtccacatgcttctgcgcctccattttcactctacgcttaaatgagcccgtgtttgcttttacagtagacaggctgggaataccataggctgaaacaaatcctagactacaaaagattttcttccagctggaaatcattttatttttctggtcataaaaacaatacgctctatggccaggcacgggtggctcatgctcgtaatcctagaacttagggaggctgaggcaggaggatcacttgagcccaggagttcaagaccagcctgagcaacatggtaaaaccccatctttacaaaaaattaaccaggcgtgatggtgcgcacctgtcgtcccagttagtcaggaggctgaggtgagaggattgttaagccactgcaccccagccaaggaggacaaagcaagaccttgtctcaaaacaaaacaaaacactatctccaaaaacatcagcctgtatacatcatttacagctttttgtatgtcagtcagtcatactgtcaacaaagcgatttaaataatagagggccagcacagtggcttacgcctgtaatcccagcactttgggaggccgaggtgggtggatcacgaggtcaggagattgagaccacggtgaaaccccatctctactaaaaatacaaataattagctgggcacggtggcaggcgcctatagtcccagctactccagaggctgaggcaggagaatggtgtgaacctgggaggccgagcttgcagtgagccgagactgtgccactgcactccagcctgggcgacagagcgagactccatctccaaaaaaaaaaaaataataataataataataagctcgctgtagaagtctggacaacaaagaaaggttcaagtggagaaaaatcacccttaaactactcagagacaactgcaattacagctttggtgtatgactttccagacaatttcctatgcatgtacatgcacacacaagtgtgatcatatgacccaatatattatggaacaaatttataagttattaaattttagattcaaattatctttaaaagctacatcatggttcactgcatgaactactatccaatatcaaaaagcatttaagttacttccaatttttctctctctagaacattaagatatttgcaagccgcataactgataaatttatatttaaaatatataaagaactcctataactcaaaaacaaataatccaatttaaaaacaggcaaaatattttgaacagacatttctccaaagtggatacacaaatggccagtaaggacatgaaaagatactcagcatcattagttattaaggaaatgcaaccactactacaatgagatacaacttcactctcaacaggatggctacagtttttttttacagaaggaaaataagcgttggtgaggatgtggagaaactggaacccttatagactggtgggaaagtgaaattgtatagcctcttcagaaaagtttggcagcttctgaaaatattaaacatagaattattatatgacccagcaattccacttctaagtatccagcaccgtgaaataatcatcagaggaattttttttttttttttgagacggagtcttgctctgtcgcccaggctggagtgcagtggcgtgatctcggctcactgcaagctccacctcctgggttcacgccattctcctgcctcagcctcccaagtagctgggtctataggcgcccgccaccatgcctggctaattgtttctttgtatttttagtagagacagggtttcaccatgttagccaggatggtctccatctcctgacctcgtgatccgcccgccttagcctccaaaagtgctgggattacaggcgtgagccaccgcacccggccatcagaggatttctttatggtggacactgaatattgtaaaagagatcctttcttccagtaagtcctaagcagttcacttcccaatgaatgcaaggtggaagatgggggcctcaccagacacagcctccaactgcttagtgagagcatgcatgatgacatcattctccacgatatagcccatgtcatctaaattatccttatcaaacattatcagggcctctgagcaggcgtcccacacctggaaacacaaaaggaaagtctgcattaaaaccaagagggaaacatcactccaatcagaaacaatattgctttcccaagtgacagagcagaaaatcacaatttgtcagcctctctggtaggaaaatataaaatgagaagaaaattctcctgggaatgcttctccccacttcctcggactgaatgtgaaccttgtctgattcctcctacattcacagaacacttggagaaagtggactccgatatcttaagacagaccaagacatcttgacaaaattgaaaagataaaggggcacctgcattcgccgaaaggctctgtatctcatgttgcagatatggtcccaggcaccaaaacctacaaaagaaaggatctatagaccagagtgacttcacaaggacctgggctcccccttgtccctccatcctgttacgtaagaggttgttttcagtgttcttcaataatactctccacttctatcttgtttgatgttagtacctaagctactctgttccccagttccaggttgtatagcatgaaaaaagacccagcttctgccgggcgcggtggctcatgcctgtaatcccagcactttgggagactgaggcgggcggatcacgagatcaggagatagagaccatcctggctaacaccgtgaaacctcatcttcactaaaaaatacaaaaaatcagctgggcgtggtggcgggcgcctgtagtcccagctacttggagaggctgaggcaggagaatggcctgaacccgggaggcggagcttgcagtgagccgagatcgtgccactgcactccagcctgggcaacagagcgagactccgtctcaaaaaaaaaaaaaaataaaataaaaaaaaaaaagactcagcttccatgatcaaaaggtcaaatcacataaagtaggggaaattaaaaacgaaaaccaaatccatgtattttttttttttttttttttgagacggaatctcgctctgtagcccaggctggagtgcagtggcgggatctcggctcactgcaagctccgcctcccgggttcaccctattctcctgtctcagcctccccagcagctgggactacaggcatccgccgccatgcccggctcatttttttgtatttttagtagagacagggtttcaccgtgttagccaggatgatctcgatcgcctgaccctgtgatccgcctgcctcagcctcccaaagtgctgagattacaggcgtgagccaccgcacccggccccaaatccatattgttctttttcttcatcatcctgctgaagttataaacctcctaaagacaatttttaaaaaattatttttacaaaggatttctagtaacttgaaaccatttgttttttctttttcaagatacaaggtcttggtatgttgcccaggctagacttaaactcctgggctcaagcaatcctcccatctcagccttccaagtggccaggactataggtacacatgactgtgcctggcctatgttctattttttagctcttcatagcactgaacagatttattcattgaggaaatatttactgagcaccgactatgtgccaaatacagtaaagtgggaaaccaatggacaaagtccttggccttctgcagttaacattctaattggagagatggacaataaaaaacaaacacataatataatgccaggtagtagtaagcattatgaagaaaaatagagcagggaaaggggctagaaagtgatggaagagttcaatttgagatggggtggtttcagacaggatggtctgagggaaacatctagcagacctaatgacaatttgctaactggttccatgtgcacacattattcatctgcaccccaagggaatttcacgtgtaagctccctagcttgctagaaggcttgactcaggatgaagagagccctgctattcaaagtgaatgttcatgattagttcatatgatttcagttccaccaattcataatgacacaacatcacaagtgaagtcaacatgatggacccacatgcctcaaggatgcattcctcagacagggagttgaggcagtagcaactgcaggggtccacatcttcaactctgccctagactaccaatcccaccccctctctccacccacctcagtgagctccctccttgtcagatgctctgatgactctgccccatgggatacactagaaagctaagtgggaaaggagattggatctttgaaggaggatcttctactcactactgagaagcgttgcagagccaggggaaatggagctgaccctgttgctgtaagtttctgacaatttctccagtactttctttggacctgcttcgagcaacaggattttcttgtcatgaaagtgaatatcatatccttaaaaaaagaaaatttatatcatcttaggaaaatcaagaatttcctttcccattaccaagagaaacaacagagtaaccacttaacccttagaatatgaatttcttacagagaacataaacactatacccatgcagagtcctaagcaataacatataccaccattttagctatgagaaccaccctgcccacaactgtaagacttctccaaagaccactacatgccacgtgccaagaagcaaataatggcaaacacctaactagcaaacagaatgccctagaaaggaaaaatgaagtaaaaaagttagactacagtatttaaacaccagttcttttcaatctccagagtattaagtcactaaaaattacaactcctgttcaaaagaaaaagtggaataaacaagcaaaattcaatgcagtctcaagattaaaccaagaataaagaattagagtttataaaggccggtgcggtggctcacacctgtaatcccagcactttgaaggccgaggtggacagatcacctgaggtcaggagttcaagaccagcctagccaacatggtgaaacccgtctctactaaaaatacaaaaaaattagccaggtgtgatggcgggcacctgtaatcccagctacttgggaggctgaggcaggagaatcgcttgatcctgggaggaggagattgcaccactgcactccagccagggcaacaagagcaaaattctgtctcaaaaagaaagaattagagtttataaaagaaaacgtgagccaggcatggtggctaacgcctgtaatctcagcattttgggaggccgaggtgggaggattgctcaagcctaggaattcaagaccagcctgggcaacatggcgagaccctgtctctacaaaaaaaaattttttttaactagccaggcatggtggcacacctgagctatgtttgtgcaactgcactcctacctgggggacagagcaaaaccctgtctcaaaaactacaaaaaagaaaagaaaagaaagaaaggtcaggcacagtgggtcacacctataatcccagcactttgggagactgaggtgatggatcagttgagctcaggagttcaagaccagcgtgggcaacatggtgaaaccccatctctactaaaaacacaaaaattagccaggtgtgatggcgggcgcctgtggtcccagctcctcagaaggctgaggcaggagaatcactggaacctgggaggcagaggttgcagtgagctgggatcctgccactgcactccagcctgggtgacagagcagagactctgtctcaaaaaaaaaaaaaaaaaaaaaaagttagctccagccatacagacagtgagcggtccatcttggcagcttttgctgtggaggatggggcacagggacatgctctgtagagcatgctctgtaaagggc

SEQ ID NO: 94979 - DNA, 25868 bp, Homo sapiens
  misc_feature (1)...(25868): n = A,T,C or G
ggcagatccctgggccctgactaaatccctatggtgggattggttccccgaggcaggaggcagcaaggtggcaaggatgtctttaccctggagtttatccccaagggctggctccagaatggacttgggaatccttctggtggccttctgcttggagatcttggcttcagctgtggctgccaagtctctctgtcgagcagcttcctttagctgctcctccttctccaggaagctgaagggcttcaaagaagagaggagcagttccttcctcttctggatccctgcctgccttcgggcctcgctgcgctccatgatctcttggtagaggggcaggtagacatgtgcaggcacaggctgtgcccggaactgcctgtggcactcggcctcttcctcaccctgcctctgggcccgctgcctctcctgctcaaaggaggcaggtgagcccagccactcggccttcttccgggcctcgcgcagcgtcatgcggaatggccgagggacagtaatggatgatgcccaggagctgacgcttctgtgctgggagggaggcygggagcctgagggtggctgggtctgaggcctgggaatgttggagggaaggttgttcagggagctgcagcgccttgtggagccacacctgggaaaaaagcagatctgtgagtggaggacagggcagtcaggaggccctgctccctccagacctcctccccagtcctcccttcccactggtcacagctggctgctcagcctaacaccacagccccacaggcctctatgtccatgaccttcccacagacaatcctggcagccctaatggaaagtctcttctcagaattgatccaagaactgccactttgcactctaatatttcatatgagagagagaacaatgagcagagtagagctttagagtcagacagacctgggtttaaatcttgcttcaaactttgagcaaagttctgttaaaacctcaatttcctcctatgtagagtggcaaaaattaatgtctacttaccaggttattggaggagaaagtaaatattaaataagataaagtaatgagataatgtacactttatctcattcaatatttactttctaaggcttgaccaagataaaggtactttgttgtcattctcagggaaagtgtatttaggaaatgcttccctgtatttttttttattttttattatttatttacttattttttgagatggagtcttgtactgttgcccaagctgggcgtgatcttggctcactgcaacctccacctcccagattcaagcaattctctgcctctccttccgagtagctgggattacaggcacctgccaccatgcccggctaatttttttatatttttagtagagacggggtttcaccatcttggccaggctggtcttgaactcctgacctcatgatccagccacctcggcttcccaaagtgctggaattagaggcgtaaacacggtgcccggcccatttttaaattttattttatttttatttgttgagacagagtcttgctctgttgctcaggctggagtgcagtggcgtgatctcagctcactgcaaccaccacctcctgggctcaagggattctcatgcgtcagcctcctgagtagctgggattacgggcacacgccaccatgactggctaatttttgtatttttagtagagatggggtttcaccatgttggccaggctggtctcgaattcctgacctcaagtgatccgcctgcctcagcctcccaaagtgctggaattacaggtgtgagcccctgcacctgaggaaaggctgccctttaattaattccagtgcatcactggactaagtgttgcccaaagtaattcaggattcctggggaggaatcagaacacctgtttggaaccaaaagctgattctcagctagagcctcagtaaatggcaacttgcagaagtgctctttgctttacagaggaagatgaagcccagagacacgatgtgacctgtgtggaggtgtggagtgaggcagccgtggagctgcagtgccttacctcagagcctgcgggcactggacctgcaccatccccctgtccttgtcttggaagaaactctccaggtcctcctcatcttcagagaggttttcatcactctctgggtcagactgaaagagagactccaacagacaccatctscctttctgcttcagttcctgtaagttctggtaaatgctcccagttgagtcagaagtagaatctatctcctcctctgggctgaggaactcgtcaagtttgctggccctgggcaawaccagcccatccccggacagctcctctcctgcctctgtgtctgcgaaggactcggggggaaatatctaaaatagaatagaaataggctgtgggtcaaacaataatttcaaaggtattcaaatcataacttaatttcgctttgaataagcttctgtatattagggactggggagaatttggggtctgccagatgcactggctcacacctgtaatcccaacactttgggaggaatttttaaaaataaggtgtgtttcttggtctaaagaaatttcacaacttggtctatgaagtgcgcttggttgaagggatggagagggaagtgaagagctgaagttggttccctatgccatacagtgcagtaagcttttacagagtacctcacctacaccaggctttctgacccctgcactccaggaatcctgcccatgatgatggccacactctcccttacttgggttttaacctacttcttgctcatcttccttctctcccttcccttatttctactcctctgctttcctcatgttctagctaatttgcactctgtcaaggaatggatgatggctgggtgcagtggctcatgcctgtaatcccagcattttgggaggccgagggaggtggatcacctgaggtcaggagttcaagaccagcttgaccaacatggtgaaatcccgtctctacaaaaatacaaaaattagttgggcgtggtggcgggtgcctgtaatctcagctactggggaggctgaggcaggagaatcgcttgaacccgggaggcggaggtggcagtgagatgagattgcgccactgcactccagcctgggcaacaagagtgatgctccgtctcaaaaaaaaaaaaaaaaaaaaggaatggatgattaacaagacagacagtatggtctggctggaagagcaatgtcttaagaagtgggacacacaattaactttttcagtactccattcattcataaaatatttactgggtgcctgatgtgcactgggcatttggctgagaacaagacaaacaaggtccttactctcatgaagcttacactgtagtaagaggagacagacaatataagatgatgataaattctgtgaaaaccataaacaactgtgaggttataaaaagatggagtgcctatggaaagctttttggttgataaagtccatcagattaaggttattaggaatgtacttgtaatcagtacatcagttaggcttattaacttgctgcaggacactacggaaaaccacagggaacttagggttgagggtgtgatttttatagggttggcttccctgattgattcagggaaccaggtatcaactctggaatggtgctgtcatgaagtggggacaatttagttaagcgaatgactgagcaattttttttttttgagacaggttcttgctctgtcacccaggttctggagtgcagtggtgcaatcatgcctcactgcagcctgaacctcctgagctcaggtgatgatcctcccacctcagcctcccgagtagctgggactacagcacacaccatcacacctggctagtttttgtattttttgtacagatggggtttcaccatgcttcccaggctggtctccaactcctgagctcaaatgatccgcctgccttggcctcccaaagtgctgggattacaggcgtgagccattgggccccgcccaacggcaatacttattcaaaaggtgagaagaataaagtagggtgggtaagtaattgatcagtaagccttttggaagaaggggtgttagtaattttgcacctatgttatggccctgagagaaacactgtttcctgatgctcttgccgttggcattatctatgcctatgacagtctgagttatactttctcagtcctgggctgatttttatttttcattgtggaggaattttgaattgacacttgattgatgaggagccaggcttactaaaatccagggtaagagtcagagatatgtatgcaccctagccctggctctgctacagtgtgtgatcttgggcacgttttttcttttcttttaaagacaactttattaagacataatttctatacaatatattcactcatttaaagtgtacaattcagtggttttagtatatacacagagttgtgcaactaccatcacaattttagaacaccttcatcgcccttaaaagaaatgccacacgctttagtggtcactccctatttcccctaaccctccacaccccaccccaccagccctaagcaactgccaatctactttttgcctttaatagtttggggtccaccaggtgcactggctcacgcctgtaatcccagcactttgggaggccttggctggtggatcactggaggcacgcgccaccacacctggctaatttttttttttttttgagacggagtctcgctctgtcgccaggctagagtgcagtggtgcaatcttggctcactgcaacctccacctcccgggttcaagtgattctcctgcctcagcctcccgagtagctaggactacaggcgcgcaccaccatgcccagataattttttgtatttttttgtttgtttgtttttgtttttgagagagttttgctcttgttgcccaggctggagtgcaatggcacaatctcggctcactgcaacctccacctcccaggttcaagcaattctcttgcctcagcctcccgagtagctgggattacaggcatgtgccaccacgtccagctaattttgtattttttttagtagagacagggtttctccatgttggtcaggctggtcttgaactcctgacctcaggtcccaaagtgctgcattacaggagtaagccaccgcacccggccaatttttgtatttttagtagagacggggttttgccatggaaaccagcctggtctcgatctcttgacctcatgatccgctttccttggcctcccaaagtgctgggattacaggcgtgagccagcgcgcctggccaattttttttttttttttaaatttttagacggagtttcaccatgttggccaggctggtctcgaactcctgacctcaggtgatccacccgcctcggcctcccaaagtgctaggattacaggcgtgaaccaccacgcccggccaaatttggggagcaattttcttaatctctttgtgcctcagttttctcttctacaaaaatgagacgacaattgtactactggtcatagagtactaagaggataagcgaaaactgagtgacattgcctatcaagagcctcgtataaagtccgagaggttcaggtctgtaagtcagagtccgcctcctggtccctaaacgctcattttaatcccacgcccctccgtgacacgcccctgctgyctstctccaaggcaacgcccaacartttcctctccgggattcctttcccgggggcagtctcttttctctcctcacctgacggctcccctccgcgcctccgggggctccctcaggcctccccacggtcatttcagctggacagaggcagcagcgacagtgacagcgatagtggcagcagcggtggcagcgagagctatgcggggccagggtccacccctttctagctttggcgtctggttggcttccagggcagcctccgatccatcccgcccgaggaggcaaggttcgttttccgattggcctattttctccgcgcattttatttccggttctgaggacgccgcsgaagcgggacgggattggagtgctctgctccggacgcactacgtaggtggkcctgcgggagttctgagtgcgacggcgcaggtctgcaccatggcggcccggcttgtcagccgatgcggggctgtgcgtgcagctccccacagcggcccgctggtgtcctggcgcaggtggtccggcgcctcaacagacaccgtgtatgacgtggtggtgtcgggtggaggcctggtgggcgctkccatggcctgtgccttgggtaagcccttctccaggctactagtggccggaaaccgggccgcggaggcacgatgagagccgtgagagccctagcacgacttgcccaaagacaatttctcaggtctcgcgacgcttctcccctcccctcctagaggaaccccagggcacgccggaatgcgtgtggtccttcagggtccattagggtcaaaagtgggaggggcgttcagagtctgttctactcatgggaaaacaggccttcccggggttatttataaatgagagttccagtttctccagatcctggacagtacttgtcattgtctttttgtttatagacattctagtgggtgtaagtaaagtgggatctccaggttttgacttgtatttccctaatgattaatgatgttgaatatcctttmatatgtttattggtcatttgtatatcttctttagagaaatgcctattcagaycctttgcccggtttttaattgagcagtttgtctcttgaatactgtggtaagagttatttttrttttttgagacagggtcttccgctgtgcccaggctgcagtgcagtggcacgatcacggctcactgtagcctcaacctccctggctsaattgatcctcctgcctctgcctcccaaatagctgggactgcaggaatgcgccaccactcggctgatttttgtatttttttgtagagacgaggtctcactatgttgcccaggctggtctggaacttctgggctcaagcaatccacctgcctcagcctcccaaagtgctgggattaccggcataagcaaccctgcctggccattattttgtttattctgtataagtcccttatctgataaatgacttgcaaatattttcttccattttgtagtcttttcacttttttttttccctgagatggagtttcgctcttgttgcccaggatggagtacaatggcacgatctcagctcactgcaacctctgggattacaggcttgtgccaccatgcctggctaatttttgtatttttagtagagacggggtttcaccatattggccaggctggtctcgaactcctgatctcgtgatccacctgccccttcctcccaaagtgctgggattacaggcatgaatcaccatgcttggcccattatgagattttttttttgtgattttttttttttttttagctcatcagctatcattaatattagtgtttttttatatgtgacccaagacaattcttccactgtggcctggggaagccaaaagattggacaccctgatctaagggcagctgttccaccctatgatcctcatctcacaagatacacaaaatttaacttaaagcagatcatagacttctgtaacagggtggttctcatggctgcttgggaggctgaggcaggagaatcgcttgaaactggaagggggaggttgcagtgagctgagatcgcgccactgcactccagcctgggcaacaagagcgaaactcgatatctcaaaaaaaaaaaaaaaaaaaaaagaagatagtgccctttacagagcatgctctacagagcatgtccctgtgccccatcctccacagcaaaagctgccaagatggaccgctcactgtctgtatggctggagctaactttttttttttttttttttttttgagacagagtctctgctctgtcacccaggctggagtgcagtggcaggatcccagctcactgcaacctctgcctcccaggttccagtgattctcctgcctcagccttctgaggagctgggaccacaggcgcccgccatcacacctggctaatttttgtgtttttagtagagatggggtttcaccatgttgcccacgctggtcttgaactcctgagctcaactgatccatcacctcagtctcccaaagtgctgggattataggtgtgacccactgtgcctgacctttctttcttttcttttcttttttgtagtttttgagacagggttttgctctgtcccccaggtaggagtgcagttgcacaaacatrgctcaggtgtgccaccatgcctggctagttaaaaaaawtttttttttgtagagacagggtctcgccatgttgcccaggctggtcttgaattcctaggcttgagcaatcctcccacctcggcctcccaaaatgctgagattacaggcgttagccaccatgcctggctcacgttttcttttataaactctaattctttctttttgagacagaattttgctcttgttgccctggctggagtgcagtggtgcaatctcctcctcccaggatcaagcgattctcctgcctcagcctcccaagtagctgggattacaggtgcccgccatcacacctggctaatttttttgtatttttagtagagacgggtttcaccatgttggctaggctggtcttgaactcctgacctcaggtgatctgtccacctcggccttcaaaktgctgggattacaggtgtgagccaccgcaccggcctttataaactctaattctttattcttggtttaatcttgagactgcattgaattttgcttgtttattccactttttcttttgaacaggagttgtaatttttagtgacttaatactctggagattgaaaagaactggtgtttaaatactrtagtctaacttttttacttcatttttcctttctagggcattctgtttgctagttaggtgtttgccattatttgcttcttggcacgtggcatgtagtggtctttggagaagtcttacagttgtgggcagggtggttctcatagctaaaatggtggtatatgttattgcttargactctgcatgggtatagtgtttatgttctctgyaagaaattcatattctaagggttaagtggttactctgttgtttctcttggtaatgggaaaggaaattcttgattttcckaagatgatataaattttytttttttaaggatatgatattcactttcatgacaagaaaatcctgttgctcgaagcaggtccaaagaaagtactggagaaattgtcagaaacttacagcaacagggtcagctccatttcccctgrctctgcaacgcttctcagtagtgagtagaagatcctccttcaaagatccaatctcctttcccacttagctttctagtgtatcccatggggcagagtcatcagagcatctgacaaggagggagctcactgaggtgggtggagagagggggtgggattggtagtctagggcagagttgaagatgtggacccctgcagttgctactgcctcaactccctgtctgaggaatgcatccttgaggcatgtgggtccatcatgttgacttcacttgtgatgttgtgtcattatgaattggtggaactgaaatcatatgaactaatcatgaacattcactttgaatagcagggctctcttcatcctgagtcaagccttctagcaagctagggagcttacacgtgaaattcccttggggtgcagatgaataatgtgtgcacatggaaccagttagcaaattgtcattaggtctgctagatgtttccctcagaccatcctgtctgaaaccaccccatctcaaattgaactcttccatcactttctagcccctttccctgctctatttttcttcataatgcttactactacctggcattatattatgtgtttgttttttattgtccatctctccaattagaatgttaactgcagaaggccaaggactttgtccattggttycccactttactgtatttggcacatagtcggtgctcagtaaatatttcctcaatgaataaatctgttcagtgctatgaagagctaaaaaatagaacataggccaggcacagtcatgtgtacctatagtcctggccacttggaaggctgagatgggaggattgcttgagcccaggagtttaagtctagcctgggcaacataccaagaccttgtatcttgaaaaagaaaaaacaaatggtttcaagttactagaaatcctttgtaaaaataattttttaaaaattgtctttasgaggtttataacttcagcaggatgatgaagaaaaagaacaatatggatttggggccgggtgcggtggctcacgcctgtaatctcagcactttgggaggctgaggcaggcggatcacagggtcaggcgatcgagatcatcctggctaacacggtgaaaccctgtctctactaaaaatacaaaaaaatgagccgggcatggcggcggatgcctgtagtcccagctgctggggaggctgagacaggagaatagggtgaacccgggaggcggagcttgcagtgagccgagatcccgccactgcactccagcctgggctacagagcgagattccgtctcaaaaaaaaaaaaaaaaaaaatacatggatttggttttcgtttttaatttcccctactttatgtgatttgaccttttgatcatggaagctgagtcttttttttttttattttatttttttttttttttgagacggagtctcgctctgttgcccaggctggagtgcagtggcacgatctcggctcactgcaagctccgcctcccgggttcaggccattctcctgcctcagcctctccaagtagctgggactacaggcgcccgccaccacgcccagctgattttttgtattttttagtgaagatgaggtttcacggtgttagccaggatggtctctatctcctgatctcgtgatccgcccgcctcagtctcccaaagtgctgggattacaggcatgagccaccgcgcccggcagaagctgggtcttttttcatgctatacaacctggaactggggaacagagtagcttaggtactaacatcaaacaagatagaagtggagagtattattgaagaacactgaaaacaacctcttacgtaacaggatggagggacaagggggagcccaggtccttgtgaagtcactctggtctatagatcctttcttttgtaggttttggtgcctgggaccatatctgcaacatgagatacagagcctttcggcgaatgcaggtgcccctttatcttttcaattttgtcaagatgtcttggtctgtcttaagatatyggagtccactttctccaagtgttctgtgaatgtaggaggaatcagacaaggttcacattcastccgaggaagtggggagaagcattcccaggagaattttcttctcattttatattttcctaccagagaggctgacaaattgtgattttctgctctgtcacttgggaaagcaatattgtttctgattggagtgatgtttccctcttggttttaatgcagactttccttttgtgtttkcaggtgtgggacgcctgctcagaggccctgataatgtttgataaggataatttagatgacatgggctatatcgtggagaatgatgtcatcatgcatgctctcactaagcagttggaggctgtgtctggtgaggcccccatcttccaccttgcattcattgggaagtgaactgcttaggacttactggaagaaaggatctcttttacaatattcagtgtccaccataaagaaatcctctgatggccgggtgcggtggctcacgcctgtaatcccagcacttttggaggctaaggcgggcggatcacgaggtcaggagatggagaccatcctggctaacatggtgaaaccctgtctctactaaaaatacaaagaaacaattagccaggcatggtggcgggcgcctatagacccagctactygggaggctgaggcaggagaatggcgtgaacccaggaggtggagcttgcagtgagccgagatcacgccactgcactccagcctgggcgacagagcaagactccgtctcaaaaaaaaaaaaaaaattcctctgatgattatttcacggtgctggatacttagaagtggaattgctgggtcatataataatwctatgtttaatattttcagaagctgccaaacttttctgaagaggctatacaatttcactttcccaccagtctataagggttccagtttctccacatcctcaccaacgcttattttccttctgtaaaaaaaaactgtagccatcctgttgagagtgaagttgtatctcattgtagtagtggttgcatttccttaataactaatgatgctgagtatcttttcatgtccttactggccatttgtgtatcswstwtggagaaatgtctgttcaaaatattttgcctgtttttaaattggattatttgtttttgagttataggagttctttatatattttaaatataaatttatcagttatgcggcttgcaaatatcttaatgttctagagagagaaaaattggaagtaacttaaatgctttttgatattggatagtagttcatgcagtgaaccatgatgtagcttttaaagataatttgaatctaaaatttaataacttataaatttgttccataatatattgggtcatatgatcacacttgtgtgtgcaygtacatgcataggaaattgtctggaaagtcatacaccaaagctgtaattgcagttgtctctgagtagtttaagggtgatttttctccacttgaacctttctttgttgtccagacttctacagygagcttattattattattattwtttttttttttttggagatggagtctcgctctgtcgcccaggctggagtgcagtggcacagtctcggctcactgcaagctcggcctcccaggttcacaccattctcctgcctcagcctctggagtagctgggactataggcgcctgccaccgtgcccagctaattatttgtatttttagtagagatggggtttcaccgtggtctcaatctcctgacctcgtgatccacccacctcggcctcccaaagtgctgggattacaggcgtaagccactgtgctggccctctattatttaaatcgctttgttgacagtatgactgactgacatacaaaaagctgtaaatgatgtatacaggctgatgtttttggagatagtgttttgttttgttttgagacaaggtcttgctttgtcctccttggctggggtgcagtggcttaacaatcctctcacctcagcctcctgactaactgggacgacaggtgcgcaccatcacgcctggttaattttttgtaaagatggggttttaccatgttgctcaggctggtcttgaactcctgggctcaagtgatcctcctgcctcagcctccctaagttctaggattacgagcatgagccacccgtgcctggccatagagcgtattgtttttatgaccagaaaaataaaatgatttccagctggaagaaaatcttttgtagtctaggatttgtttcagcctatggtattcccagcctgtctactgtaaaagcaaacacgggctcatttaagcgtagagtgaaaatggaggcgcagaagcatgtggacagtaagaaagagtgcctctgacagagttcactgagaacttcaatgtctttttttgacattgagttatctctgtggcttctgtcatttattagctcagaccacagcattaattactgatttttttaatcttaaatgacaagacactgctgtcctgggaccttgctttaggtttagttatggctttttcctcagcctatgtggcccacctttctaattttttttcctctcttttgacctccccagaccgagtgacggttctctacaggagcaaagccattcgctatacctggccttgtccatttcctatggccgactccagcccttgggttcayattaccctaggtgatggcagcaccttccagaccaaattgttggtagttgaagattcttattttgctaggggtcttgtatatctacatcttatcctagattctagggactctggttttngatttaagctatagtttaattttaggcaaaacttttggttatgaggaccagtacctattcaggccagctcaagtggagatggtctcatcgtaaatcctgtacagggagcaatctcatgggccgtcttaggttgtgaaataacagatagctgggcctcacaggacaggcaccagagtgttgggaatggaggctgttctttccctctgaggagtctgtggtcattgatctcttgcctctcatttttctcctttctgctcacaagcttccctttttgcatggtagccattcctaaccctacatcagaactattcagctccagtgtgtgccccatactgaaactttccttattgctctctagttcaaatatcaggagggcctggctgagtttaactcatggctggcacctgttcagtcatgtccagctttggctctgttggctgaggctgatgtgacagtgcaggggctccacctctaggggctgtgagtgaagcaggcctgatggaattatcctgccacacaacaatcagagctggaggaaactttagggagcagagaaaaacttctgaagcagtttatgaagaggctggaagacttagcaggctcatgtgtccatgcagataggtgcagatggtcacaactccggagtacggcaggctgttggaatccagaatgtgagctggaactatgaccagtctgctgttgtggctactctgcatttatcagaggtaagatcctgagctgccatctggggactttattcataggcactaggtacttcacagagaaacttttctcctctctgttgcaggccacagaaaacaacgtagcctggcagagatttcttccctctgggcctattgctctgctcccggtaagaggtccttctgaccagtccgcccacatgcatgcaagcctttcctcttcactttctctcagcctttttctggtttcaagggaatctgcccaggctgtttgtaagttccctttttgtctttttatgcttgagagtttccaagtgcagcagagtcttagccgttggtattggtgttcttttgacacagctctcagacaccttgagttccttggtttggtccacgtcmmatgaacatgcagcagagctagttagcatggatgaggaaaaatttgtggatgccgttaactctgcctttgtgagtatcaatttacccagctgatgatgtgctgcagggggagatacagaaaggtgttgtttttttttttttgaaacggatccttgccrggctggagcgcagtggcgcgatcttggctcactgtgcaatctccgcctcccgggttcaagygattctcctgcctcagcctcctaagtagctgggactacaggcacgtgccaccatgcccagctaatttttctatttttagtagagatgaggtttcaccatgttggccaggctggtctcaaactcctgacctcaagtgatctgcctgccttggcctcccaaagtgctgggattacaggcgtgagccactgcacccagccagaaaggtggttttgagtcaggaaaaaggagtaaccagtcagctgtccctttctactttgtaactataatgcttggtctagattatgtggaggagtgtayacacggaaatgcaaaacaatagaaataataaataataaccttttgagggttgtgggctgctgttaggctgactgaaacagctgcctgggtggtggttagcattggcctttttttgaagctgtaacacttggattattttgaacagttctgctaggttgcagctacctgaacctttcaagccygattcattgaaagtattcctagggaaaggccgagcgaatttcagcatggggcttaagagtaagcttagtagatagrtgtgggttcaamatgtaaatagtatcactaactgctcaggrttgaataaagactttcaaaatgagagaacttttgtaaaatccatggaacatctttagtacattgtaggtgctcaacaaatactaataattctggagtagacacagcctttggataatatgggtaccagtattacttttggagcctaaatgacactcaaagcctgctaccttcacaccaaagactccactgctctgtagtagcaacaagaataaagggaactgaacatactgaaatggattccgagataaatggtgaacactaccctactctgggccatttagtatatattcctggcacaggtctaggtcctctgcagtgcagtcattcaccattaattgtcctttctatgtagcaggctctggagatactgagaacagtctccgctttcaggaagttcatagtcaagtaaggaagaccgtaaatgacaatctcygtacagtgatagaagtatgcataggatgctgtggaagcatacaggggggaaacacagagaaagactggaggagttaaaaagaggcgacgtcttctggatgctctgagatgttatcctaatgaaatagagacgggcattctaagcagaggagagtcatggaggtagaaggatactgtgtgatgagctatactgtggctggtgcgtggttattgagggtggggactagtgaaaggtgaagctcagaagtaggcaggggccagctcatgtacagtttggctagatcttaaaacctctggggagtgatgagaagttgctttgcacttgaggggcttatcacttgtcaagatcagtgtaggcaagttgggtagcattagcctaagctttggttacaaacaaggtttctttattgaatttttaattccctgctactcacatttcaccttgtttgtcttgtggctgatgctgctcagtgragtkatgctgaccacacggacttcatcgacacagctggtgccatgctgcagtatsctgtcagccttctgaagcccactaaggtctcggctcgccagctgcccccaagcgtagccagggtggwtgccaaaagccgagttctgtttcctcttgggttgggacatgctgctgagtacgtcaggcctcgggtggcgctcattgggtaagacgataacagagcagggccactcccttctcactttgctgccagaggtcacacctgaactctgctttattcttaggratgcagcccacagagtccatccgcttgcaggacagggtgtcaacatgggctttggggatatctccagcttggcccatcacctcagtayggcagccttcaatgggaaggacttaggtaaggattcagrtactatggggaagtatccagaggtcatatagttaggcaagatcagggcccayagtagcaagagggagtggacataaaatatatctggcttgctaggagatggaagaaaaccttattattggattagggatttaatctttcctctgcccttcaggttccrtgagccacctcacaggttatgaaacagaaagacagcgtcacaacactgctcttctggctgctacagacttactaaaaaggctctattctaccagtgcctccccgcttgtgttgctcaggacgtggggcttgcaggccacaaatgcagtgtctccactcaaagtaagaggttgctcagaggaatgactttgcaaacagctcttaatttcttttgcttttttttgaaacagagtcttggtcttatcgcccaggatggagtgcagtggcacaatttccactcactgcagcctctgcctcccaggttcaagtgattatcctgcctcagcctcccaagtagctgggattacaggcgcccaccaccacacccggctaattttcttatttttagtagagatggggtttcaccrtgttggccaagctggtcttgaactcctgacctcgtgatctgcctgcctcggcctcccaaagtgctgggattacaggcgtgagccactgcggctggcccacagctcttaatttctttgaattaattttcttggctgtaaaattattatctttatgtgtttgccttcccaagggttacaagcagaagagtacttgctaggcttttaggtgttacggcccacatctaagcaataactatgtataaaaagggcttaaaaatagtgaatagggagtgtggtggcacrtgcstgtagtcctagctattcaggagactgaggcaagaggataatttaagcctaggagtttgaggctgcagtgggctatgatcacatcattgttactcagactgggtgacagagttaagaccagtctcttgaaaaaaaaaaatgaatagggatttctaatgatgaagatgtttaagctccttttgctgcttgactagtttcatccctgagaacttccatttaaagatatgttttttctgatgggtgcagtggctcacacctgtaatcccagcactttaggaggctggggagggaggattgcttgagcctaggagtttgaggctgcagtgagctatgatcacaccactgcactccagcccagtcaacagagtgagaccctgtctctaaaacgtgtgtatatgtatgtatatttttctttttttagctgaaataaaacaaggacacttgggaagaatacctacgtgattattatctacaataattattttcttcaccttactgtgttaagagtttcattcacttttattttttctccaggaacagattatggcctttgcaagcaaatgagtactcctctcctaaagaaagattacgytgatgaaaaagaacatcctgcccaggacccatcatacatattttcaagatcttatttaatttaataaacttactttacattaaaattctctttttcttctttgcttaatgggcctgtggcacccaaataatgaatgataatttgctgtgaggagcgtatattagccagaccaaaggaaaaaacttcgaaggaagacttacaatttggttgaaaagagctttttattactaaaaaacccacaaggtgctgtctcactcatttccagttaatcatttctaaagagaaaatttacattttgtttttgttttaatgttggtcataaatttatacagttgttttttgatagaggtaagaattagactcgatgcatttttgttagaattgctgtttaaatgttaacatcagaatgcaaattaaatataaattgctttaacctttgttacaggtatactggactttctgaaaggaaaaccaggtctcattaatgctagttattactttatcacagcaccagatttccattttatttatggttcctctctgggacaccactgtcggtttaataaaacaataaataattcattgcacagatccgaagacctcaggaaccrgatcacaagggaaaccgattagcagcagaatttgttcatgtttggtggcagactggtggvcaactggagggaggggagttttactgtgggtttttgaagaggtctygtcacaagaccagagatgcctcttgaagagatttttaggttgtaggtttgcttactctaaagaacatcttgcccagaagtctgatttgagatgaaatgaagagaaacagtctgcttttgaaccaagtaaggtattcttgggaataatttttagagccatgagaaatctattcttacaggggtgcttttcaggcaaatgcagaaaatttaaaagagtctagaacaaaaaagtgacaatgtcacaaccttgctggaatctcaggaaaaagaattaaagatggcagctgctgtgaaaagctgtgtgactcctggcggagactgcagggacaaggtcatctttcacaaaaaatggaaaggtggcctagatgaggaggacacagactctccagaagttatgcaaacaaaatcaggcaagatgaagaattttaaggcacacctccattggcccacagagagtgttcttcatatgacaatgatgttaaacaccatctgtcacgtaccaggccatgtcctaagtattttaaatatgttaacayatctacaaagaggaaactattagaatctgtaggacctcttaagcccaaagggtctactgcaggcaggatgggcgttacagaaaaaaataaaaactctcattccaaattgctcctaagatggacaaattggttacttctccagaaggtctaatcaaggttaacaaaataggtaagttcgtggagttagaatgcatcttccctggagttcggaggtatttgggatgaccaaaggagtctgctggacagtatgtgtgttttacaaaatggcccccacagtgattaaagaccagagacttatatctctgcatttgtcaagctggaacagtctttagtgaacacagcttacctcttttaaaactgctggtttctactgaaggaaacatggatgacatttagtgttctgtgactggtctggcaccctacttttgttgacaaagatgggaaggggtctaaaagtcatgtcacttataaaagaacttgggaggaacttttttcaaaagatccaaagattttggaaggagagattagagcagaactaagaccacttagaagataggtagatttcagctcaatataaggaattttttttaatatcagtgcagttccaaatggaataagctgtttgaacatggcttagcagaagctgaatgacaacctgttagaaattctagggaattctgcactgagtacaacattggattatttctttgggctgtttccaactcaagattctgttatttcattataagcattttgaggaaggcagttggtataaaggtgaccttagtaataaaagtcagtgtgaagtctaaagaaattccacaatgaatttaaagacaagaattttagggacaaggatacagaaatttgcctagtaacttgcacacagcagatggtaaatatttattgactcaatggagtaatgttaaaaataaggtttcccatggactgtgtgagggccaggcatacttaacatcctttgtgagagagaggatggaaacggagtctactgtgaaagccacaagttttggggaaatacactcctgcaaagaagctggaggttaacaaccaaggcaaaggggccagaccacagggagatcttccaggtccaagagcactgcagggcagatgagaagcagggatgattatgttgaaagtgcaagataaggccaggcgcggtgtctcatgcctgtaatcccagcactttgggaagcgggtggatcaattgagatcaggagttggaaaccagcctggccaacatggtgaaaccccatctctactacaaatacaaaaattagccaggaatggtggtgggcacctgtaatcccagctcttcaggaggctgagaacaagaatcgcttgaacctgggggcggaggttgcagtgagctgagattgcgccactccactctagcctgagcaacagagcaagactccatctcaaaaaaaagtgcaagataatgaatttggggtaaataattcacagtcaagagctctgagcacttggattcaaaaagagagcatgagggacattaaatatggttctccctggaaatgttggtccactgtactgatgtgggctgagagagccaaccaaatccaagtggggttttgtcaggaacggtattggaaactctgaactagataaataattcaaaggatattagctaaagtgatcagggaccaggacaggaaggtactgttacaaacggagagaataaaagggcaaactgaaataatagatcctggaatagcacagacactgacctctgaccacagaccaaaagttagggcctagttgtatttcttagaaatacaaagaaaacaagtttagaatcatagaaaacactgttaacacattagcctgggaggtggtactggcactgaatatacacatacccataaagtcggatatgttcattaatcccagagttgactgataaaatgctgattaaagcaaaggtaggctatatgaggcagccacaccctcccaaaacatgtccccagagaccgggtggccttctttcttaaggctgtaatttatgcacagttaggagttactctctcatcctattaatatttaggatggctctcagctggctgattggagctaacacagaataggatcatacagattctgacatggtcccattttgcgttgttgaattatacatggaaagcaaaaccaggtttttttttttctctctttttcaggggaggtgggtgcagataagggtgggcagggcactgtatagggaggaaaaaaatactgatattgatgggtcttgggattgcaataagtcagtttaccatttaagaggaaaatttaaatattcagtggaatgaggcactcaaagggttgaaatgcgatttttctttggtttccagggacctgtccctgggctctcactccaaggttaagttccaaaactatactttttggctcacagggctctctgtgatgctctggtgccagctgtgtactcttgagtggttaggcagcagttcacattagrtgtgtaaaattaattaaacctaaatctctaggctcaagtccaggatgtccccagactagttcagaaactaagtgctctctcctccccttaaaaaggtgttggcaaatgcaggtctccaaggaagtacgtggcctcaatgggagatgcccagagactgcaacaggtgaaaggtggcccccaaggcccagcccgtctctatgttgttcactttctttgtgagctgttgagaagaaaaaaagtcttcaccttttcatccagtttccaactctagcaagcacagctcttgggcagaaaatattggcaaagaatatccacatgggcaaaccaaggcaaaacggacagaagccagtctttgcaggcttcccactactctgtaacaatttccttccggccatggcccattggccattgcccctacacccaccattctcatatctgaactgaatgcttctggcccaggttgtggcccatcaggccttctagagagatagtttagacagacagtattctgaactttccctaacgttgaaactacacaaagtatcccctgctttattttctgattcactaatttcagataaggcaacttgtaatgataatagatgtggcagaaagagcatggtcaggaggtgagaatagatctaggggtaggaaagaacaaaccaagcttctcaactcctactatgtaagcaagtgcctcttcctaagcactaataataaccaaacatggggccaggcgcagtggctcatgcctgtactcctggcactttgggaggccaaggcaggtggattgcttgaggccaggagttcaagaccagcctgggcaacatggcaaaaccccgtctctacaaaaaaattagacaagagtggtggcacacacctgtaatcccagctactcagagggctgaggtgggagggtcacttgaacccgggaggcagaggttgcagtgaactgagatcatgccactgcactccagcatgggtgacagagcaagaccctgtctcaaaaaaaaaaaaaaaaagaaaaaaaaagaaacgaacaaaaaaggccaggagtggtggctcatgcctataattctagcactttgggaggctgaggcgggtggatcacctgagatcagaagtttgagaatagcctggccaacatggtgaaaccccgtgtctactaaaaatacaaaattagccaggcatggtggcgcatgcctgtaatcccagctacttcggaggctgaggcaggagaatcagttgaacccgggaggtggaggttgcagtgagctgagattgcaccattgcactccagcctgggcaacaagagcgaaacttggtctcaaaagaaaaagaaaagaaaaaaataatcaaacagggaacttaagacattctaagccagtacatatctcaattagcttagtgaccttgggcaaaactttagacccaaattcctcaactatataagaagaggattagattagtgtttatcggtttatcaatttgttttcttcagaattttaggggtttcttagaaatgcttcgaaggaaaaagggaggccaaatgatagaggagtttcaggcccccaatctctgcttcaaccagaatagttccacttttaccagttttatattactgatactctttttttttttttttgagacggagtttcgctctttgttgccaaggctggagtgcaatggtatgatctctcctcattggaacctctgcctcccaggttcaagtgattctcctgcctcagcctcccaagtagctgggattacaggcacctgccaccacgcccggctaatttttgtatttttagtagagacggggtttcaccatgttggctaggctggtctcgaactcctgacctcaggtgatccgcccgcctcagcctcccaaagtgttaggattacaggcgtgagccatcaggcccggctgtattactgatattctacataagtttttgttggataaagatgctaccaccaccaaaaaagtctataaaccagttgattgttctgtgttgacctgatgtaatagagcctagacactgtgcccaaaactggggataaataacttactacagataaagtagagcctgcaggtactgaaacagatggagagagacaggaggacaaagaaagacctaagattcaagaggcattaaatatacgaggcacacatgaaatatatatgacacattacatatgcatgaggcattcagtgttcatgaggccttaaataagccactcactggtgacaccctcttggtctctcatgtcctctgccaaagaaaacccatcttataggctaatgactgagctaatgcaaatggccatgtgtgtgtgcccctggggcctctccaaatagggcaagtttgtgtggtggcctcaggcaccttttgtctttgtgctcccatgaccgaacttcagctctagtatgtgtaaccactctattagcagcagagacaggcaggacatataaacctaggacaaatggaacccaagattcagagagtgtggcacttgcatcctgcttgcaccgtgtcttctgtgttcacctctccaactctttccccttgcttctcaccctgagttctaaactgatttaataaaccatgtgggccgggtgcagtggctcacgcctgtaatcccagcacttgggagttcgaggtgggcggatcacctgaggtcaggagttctcaggagttcgagaccagcctggccaacatagtgaaaccccatctccaataaaaatacaaaaaaattagccaggagtggtggcgcatgcctgtaatcccagctacttgggaggctgaggcagaagaatcgcttgaacccaggaggcgaaggttgcagtgagctgagatcatgccattgcactccagcccaggaaacaagagcgagactccatctcaaaaaaataataataaataaataaataaataaataaataaataaaccatgtgacttggcatcttaatttgggctgctagtctttctgttctgtgacctgtgcgatagcttgcctggtaatacactcggaggctaccattgcattgagataatttcccacattcatggtgcccagcacagtaccttgtccatagcccaaacaaaaatacctcataatttcacttctagctactctgattactgaacaagctcttactccttctcaacccccacaaaagagggctgttatgagactctggtgtcctgtctcttacctgtaagactgtgctgtctgcaaagccaaagccatcctttaacagggctgtgatgtagctgagatccatgcacaggaaaggactgcctgaggtgaagttttccaa

SEQ ID NO: 94980 - DNA, 45720 bp, Homo sapiens
  misc_feature (1)...(45720): n = A,T,C or G
atttcaagactcttctcttccattgatctatttatccttgcatcaacagcacaatgccttgattactacagttttttaaatacaatatttatacgatttaagaatacatcctatgccaggcgcggtggctcatgcataatcccagcactttgggaggccaaggtgggcaggtaacttgagaccaggagtttgagaccagcctggccaacatggcgaaaccctgtctccactaaaaataagaaaattagccaggcatggtagcatgtgcctgtaattccagctacttgggaggccgaggcatgagaatagcttgagtgagctgagactgtgccactgcactccagcctgggcaacagaacaagactgtctcaaaaaaaaaaaaaaaaaaaaaaagaaagaaaagaaagcaagcttggaagtggattcttccccagctgagtcttcttatgagaccacagcccagcccagactggcagcttgattacagagaccttgagccagaatcacccagctaaactgtgcatggcttcctgatccttcaaaactctgagataatacaataaaagttcatagtttttgtttgtttgtttgtttgttttttgagatggagtctagctctgtcacccaggctggagtgcagtggcacaatcttggctcactgcaacctctgactcctgggttcaagtgattctccttcctcagcctcctgagtagctgggattacaggcgcccgccaccacacccagctaatttttgtatttttagtagagacggggtttcactgtgttggccaggctggtctcgaactcctgacctcgtgatccacccactttggcccccagaaagtgctgggattacaagcgtgagccacggaaaagttcattgttttaaaccactaagttttgggggtaatttgtttgtagcaatagataacgatacaacagccaatcttcaaaagtttttctttcaaggttattttcacttggcatgcaagaatttctaaacctctaagagttttcaagctctcttttctgaaattgtacttcaaaggacagatacattaatggggaacaaaaacatgttgatcacatttataaatatccatacaacttggtaatcatataaatgttcttaatttaacaccttatacggttagagtctttgaaatgattttatgatacagaaatgtcgctcttcatcagtaactgcaggggagagaagaaatctcattcatctctttctgggactctttttgttaattttgaagacttagcatttttaaggtcaggctctggatttcattagtcagcattatatgtaaaatgtaggctagtggagctaaattttactggcagaagtggaggaagaaatatagccgggtgcagtggctcatgcctgtaatccaaacactttaggaggctgaggcaggtggatcacttgaggtcaggagttcaagaccagcctggccaacatggtaaaaccccgtatctactaaaaatacaaaaatacaggcatggtggtgggtgcctgtagtcccagctacttgggaggctgaggcaggagaatcacttgaacctgggaagcagaggttgcagtgagccaagatcccgccactgcactccagcctgggtgataaagcaagactccatctcaaaaaaaattaaagtaaataaataaataaataagcttttatttaatagcagtgaaatagcttatagcattcaagcccctaaagagatcagtcataccaataggaggtacaggggagaaaattttgctttgcaattttgagatacattacccacagtgactttaactaaaagcagtgggagaaaattcaggtccaacagaggacaactctgactggccatgttagttccaagctccccggggagttcagcttctcctgttgcccagtcctgctttcttcctcttcctccgataggtattgattcaaaaggtattccctaatagacatcctgcataccaaactccccatcagggtttgctttccagagaacccaccttgtaataggcacaaatatgacctttttctaaatgctcaatttttctgaaaaagcatttatttaagcttgagtttcacaggattcggttacagcatttttttttttttttttttttttttttttttttttgagacagagtcttgctctgtcacccaggctggagtatagtgaygtgatctgggctcactgcaacctctgcctcccaggttcaagccattcttttgcctcagcctcctgagtagctgggtttataggcgctcrctaccatgcccggctaattttttgtatttgtatttgtatttttgtattttgtatttttagtggagacagggtttcaccatgttggccaggctggtctcgaactcctgacctcatgtgatccgcctgcctcagcctcccaaagtgctgggattacaggcatgagccaccgagcccagccaggtgtggtttttatctcttactttgttctgttatctctttaggatgtatgtttgggtttgaatttgtgtcattatgaacaattatcacctccatggaaaaatgttttatttagcatcaaataatctttgatgttgcactaagtgtcatataccatgcaggttggtcaaacttgaatgatttctcctgagtaatttgctatcatacgaggttattttcatttaaaaataatttaatgaatgaaaaaactaaaaaataatttaatgaatgagtatacaaacatattagattaagtatttatatttattttatttatttatttatttctgagatggagtcttgctctgtcgcccaggctggagtgcagtggtgcaatctctgctcactgcaagctctgcatcccgggttcatgccattctcctgcctcagcctcctgagtagctgggactataggcgcccccaccacgctcagctaatttttttgtatttttagtagagacggggtttcaccgtgttacccaggatggtcttgatctcctgaccttgtgatccgcccacgtcagcctcccaaagtgctgggattacaggcgtgagtcactgcgctcggccaagtatttatatttattatgcatttttttttttaagagacagaatctcattctgttgcccaggctggagtgcagtggtgcaaacacagctcactgcagcctcgccctcctgggctcaagtgatcctcacacctcagtctgtcaagcagctgagacaacaggcacacacatcacaccaggctaatttttaaaattttttgtagaggtgggttttgccatgttgcctaggctggtgttgaactcctgggctcaatcgatcttcctacctcttggcctaccaaagttctgggattacaggtttgagccacagtgcctggctttttttttttttttttttctttttttgagacaaagtcttactctggcacctagggtggaatgtagtgatgagatcatagctagctgcaacttggaattcctgggtttaagcgatcctcctgcctcagcctcatgagtagctgctgggactgcaggtgtgtgccaccacacctggctattttttttctttttgtttttttttttggttgttgtttgttttttgtagagataggggtctcctatgttgcccaggctggtctgaaacttctggcctcaagtgatcctcctgtctcgcctccctaagtgctggaattatgagtgtgagccactgcacctggcctatatttatcatgcttgaatgaaacaatatatactatgtatttttttttgataagatggagatgagaagaattgacacttccttctagtgaagtctagaaaatgattctcagggctgggcgtggtggctcatgcctttaatcccagcactttgggaggccaaggcaggtggatcacctgaggtcaggagtttgagaccagcctggccgacatgatgaaaccccatttctactaaaaatacaaaaattagctgggtgtggtggcatgcacctgtagttccagctactcagtaggctcaattgcttgaacccgggaggcagaggttgcagtaggccgagatcgtgccactgcactccagcctgggcgacagagagagactccgtctcaaaaaaaaaaaaaaaaaaaaagaaaagaaaaaagaaaaaaaagaaaatgattctcaggaattgcttgaacgatgagaaggaggcagtacaaagttctgcaaagagggaggagtagggaattccagatttatggcaaatataacaaagggtcaggtgcttggactcaggcaggataacttgctcctttacttattagttacttaacctgacttagaacttaactagcttaacttcggtttcctcattcgtaaaatggtaataataataatagggctgttttgaaaattaaatcatgtaggcaaaaaatcatataaggcattatccaactcaaactacgcattatgtaaatgatagtaatccttggtgttagagaaaatttagaagaagaggataaactggatagaaatgtacctataaatcctctactcatctcttgaatttttgggaactcattttggcgagaaaaatcacacttgttacaaggagttcacagaccctagaatcaagagagctaaaactaattaatacacatacatatatttaaaatttttgagacaaggtatcagtctgtcacccaggctggagtgcagtggtgtgatcaaggctcgctgcagcctactgagcagctgagagactaccagcaagcaccaccacacctagctaatttcattttattttttattttttgaagaaatgcggtttcaccacgttgcccaggctggtctcgaactcctgactcaagcaatccacctgcctctgcctcccaaaggtctgagattacaggcgtgagccactgcgtccagccccaaaactaatttaatattgcagggcttcttttctattttgaaagtgtttcttttaaatcaagttctagattacctttattttatactactactttttgtctatttgagcattttatttttcatcatttggtttaagtcattacaaaaggcattgaaggtctgtctacctgtccatgacagataaaagagattagctcctgtctgaaaatgtttgcaaagtagtgtaattctcctagtccttcctgaagctttcccaaagaagcaaaaatattcagacataaagctaccaggaactccaacctgtttgatcactattcccttgctcaccaacctagtcatctttcagctactccatgcatgacttgtgctgagctattagctcccacatgaatacaagcaattcttatacctgcctaattcagatgatctttcttagggtttgaagtccctggggatccgaagctgtcctaggtatacacttctctcaacccagtccagcacaaaaggagacgactaacgatgaatgaaattgagaaatcagcccacactggtaatcttggaggaatttggtattcttcgtgaaataaaagaggcgcaaaggggccctggattagggtccggagagaggggttttatcccagcactgcccctaaccagctgaaaggtaggtggtccaatcacatcagctctccgagactcagtttccccatctataaaacaaggagtaggcttgacggtccctgtctcactataatttcccaatcgaggttcagggagaaatccacaaaactaataaaacttcttcacggactgctaaatgtgaactcactggtcaaggctgcaagatttgctctttgggtcaaggcagtaggggcggccacaaggaaccaatctcagttaagttattaatgcactttgcccagactagtaactctcccctgacgttccgcatttcccttgcttctcccggaaacgtggggcgcccaggaatcctaaacttccaatccctaagcttccaaaccccgcccctgggaggggagggggcgcggagccgggcctagtcgcgcgcctgcgtactgcggtcagagggccgaggcctgggggcgagctggggtcgtgcagtacagcctctttccggcaaatcacgcgagatttcgttcacccgggctccacasggtcagtgacgcgcgagcggctcccgcgactgtggctcccgaagctgcttcgggccccagcggtgaggragaagactctcaaccagggtgacttctaggcgtcctccckgagctaccggggacactggcgttattgcccgsaacactgagatagggaatgctcgagaaacagaagcaggttttggggttttttttgaattactgggggaaagcaacctgaggttttgacgtaattgtgtttgaggtgcctctgaaactttcatttaacacagatttgttgagcacgtaccatgcgccgggcataggggattggactcacatttttttgtgtgtgtgacggagtctcgctctgtctgtcgcccaggttggagtgcagtggcgcgatctcggctcactgcagcctccatctctcgggttcaagcgattctcctgcctcagcctcccgagtagctgggattactactgcgcccggataattttttgtatttttggtagagacgagatttcaccgtgttagccaggatggtcttgatctcctgacctcgtgatctgcctgcytcggcctctcagagtgctgggattacaggcgtgagccaycgcgcccggcctggattcacatcattgaacaaagcagacgagtccttatcctcttagcgctgacgagctgggcagttagtttgaaattctgggctagagacgcaaattattattaatttccatataaagtggttggtaggaggagccacagggctcagggaggtcactgagaaagggaagagcaagataggaatctccacatgcaagacttcgggaggggaagggggagaccagaaaaccggaaggggaggagaagactggcagagagatccagaaagacacgtggtttgtttgtttgttttttgagacaaagtctcgctctgttgcccaggctggagtgtcctggctggatctcggctcactgcagcctcagtctcctgggttcaggcagttctccagcttcagcctcctgtgtagctgggactataggcgcccaccaccacgcttaatttttgtatttttagtagagcggggttttcccatgttggccagactggtctcgaattcctggcctcaagtgagcctcccacctcagcctcccaaagtgctggaattacaggtgtgagccacggctctgggcccagaaagatacgttttataacaaggcgtggtcaacagggttgctagtggcagaataatcgcacgaaataagggtattaaaaggtattaggaagctcatgtgatggaaatagcaggtgccgtgttggagtatgggttctagcgttattacaagttgggcgactctgggcgaattattctctttctgtacctcttttttcttctcttttttctttttttttgagatggagtttcgctcttgtcgcccatgctggagtgcaatggcgtgatctyggctcactgcaacctccacctcccggtttaaagcgattccccagcctcagcctccagagtagctgggattacaggcgcccgccaccacgccgggctgatttttgtatttttagtagaggtggggtttcgccgttttgtcggagctggtctcaaactcctgacctcaagtgatctgcccacctcagcttcccaaagtgctgggattacaggcctgagccaccatacccggccccttttctcatctataaaattgagaggatgatattaccaacctcacagtttttttggggtgagggtgggggaggtggtttaaacaggctagtgaatgagtctgtgctcagttcctggcatttaggaatattaaggaaacaggttgagagaagggactttttccaagttcccacctggttagaactaggagaagtactctgttcttcctacttaaatgacctttcccttttaccaggctgcaaggtaaacactcaacacactctatcatcacatcggagcaaattcgtctgttattattttggaatattagcaccaagtaggaatagtatcccaggcaaataggatttgctgagtttttttcccctacttgggatgaatttaacaatctacccttctttcagatcttggaacttgatgtgtcttattttagctgttaattttatgactaaatctaggtatctatattttatttatttttattatttatttatttttttgagacaaagtttcgctcttgtcccccaggcttgagtgcaatggatcagtttcggctcactgcaacctccgcttcccaggttcaagtgattctcctgcctcagcctccggagtagctgggattacaggcacccgccaccacgcctggttaatttttgtatttttagtagggcagagtttcaccatgttggccaggctggtctcaaactcctgacctcaagtgatccacctgcctcagcctcccaaagtgctaggattacaggtgtgagccaccgtgcccagccaagttatctatatttgaaatgtgtgtttttttggtactattgagggatatcacacaattatcctatattaattgtagtatttgacacttgaaaagtttctaatttaatgcagagtgagagaactttaatagtatatttttcatgctgataagcagtgtttggacaaatctataatatacatattaatatgttaaacaaataaagcataccattgacagtaattagagggcaaatatgatatttcatttggaaagactgctttgaaaatttagccattatggttctattactacttaaggacttttagacccacttaatttggaaaactttggctttttaatccttatataattgacacatatggtgattctgtagaaagtttcctttttaaaacatatgtagccctacatgacattatggacctcttggtgtgatgaatggatgtggcaccacccttaaagattcttgcctgaaaaattgaacctgaagtaatcaagcctctagatgtaactagcagtcatggataaggggaggagatagaagaaacatttccttctttctttaaaagctagtcatttaccttgtgatggtaaatgacaccatgaggaagcaatcaaagaacattctacaagcaaagtaatgaagaaacaaatcaagggcatgaaataaatggaagggagactcaaactgtagtatgtggaccttgaatcctgattttaatgaaccaactgtaaaaagacatctttgaaacatttttgaaaccaactgtaaaaagatatctttgaacatcctgaaacgtcaggaaatttgaatatgcactaggtattagatgatgataaggaattgccagtactactattaggtgtaataatggcatagtgtttatgtttaaatctgtgatggctgggttatagtcatttgccatataatgacggttcagacaatgacagacgatgagcctcccataacattataatggaattgaaaaattcctcttgcctggtgatgtcatagtcatcagaacgttatagtgcaattactttatttttattatttatttattgagacagggtctcactctgtcacccagactggagtacagtggcgtgatctcggctcaccgcaacctccacctcttgagttcaagcaattctcctgcctcagtctctgagtagctgggattacaggcgtgcaccaccatgcctggctgatttttgtatgtttagtagagacagggtttcaccatgttggtcaggctggttgtgaactcctgaccttaaatgatgcacctgcctcagcctcccaaagtgctgggattacaggcatgagccaccacgcccggagtattactttattttttaagaaatttagtggggccgggcgcggtggctcatgcctgtaatcccagcactttgggaggccgaggcgggtggatcatgaggtcaggagtttgagaacagcctgaccaacatggtgaaaccccgtctctactaaaaatacaaaaattagccgggcatggtggcacgcacctgtaatcccagctacttgggaggctgaggcaggagaatcgcttgaatctggaaggcagaggttgcagtgagctgagattgcrccactgcactccagcctgggcgacagagcaagactctgtttcaaaaaaaaaagaaagaaatttagtgtagtctaagtgcatagtgttaataaagtctaagtagcctacagtaatgtcctaggctttcacattccctcaccactcactccctgactcatccagagcaacttctaatctggtaggctccattcatggtaagttaccctatataggtataccattttaaaatcttttttgttgttgttttttttgaggcggagtttcactcgtcacccagactggagtgcagtggcgcaatcttggctcactgcaatctccacctccagggttcaagcgattctcctgcctcagcctcccaagtagctgggactacaggcatgggccacctgcccaccggctatttttttttgtatttttagtagagacaggatttcatcatgttagccaggctggtctcgaactcctgacctcaggtgatctgcccgccttggcctcccaaagtgctgggattacaagggtgagccaccgctcccagcccatttttaaatcttttaccccatatttttactgtactttttctatgtttagatacacaaatacttaccatcgtgttccagttgtctgcagcattcagtacagcaacatgccatataggtttgtaccstrgaagttataagctaaaccatatcacctaggtgtctagtaatctgtaccatgtaggtttgtgtaagtatactctgatgttcacacaatgatkaaatcacctaatgtcacatttctcagcatgtatcccagtagtcaagctgtacaaagcactcacaagagtgcttggcacatagtaacactaagggcttgattttctaattttcactggtggataaagtaagcaaagtgattttcagcaagtcagatagtgctagtactggaagttcttttgctttcttcattagctcaaattctaaatccagaataaactggccagatgtagtggctcacgcctgtaatcccagcactttgggaggtcgagatgggaggatcacttgagcccaggaattcgagaccagcctgagcaacatagcgagacctcatctcaaaaaacaaaacagaataaactgatcctttacttattggccatattgtgatatggaatttcctataaggtaaggatttttaaattccttgatatattacttttattgtcagctaaactataaaggaatttccgttttttttttttttaattcaccactgataagaaggcaaaggaatttccattttgatgaacgaatagaagagcctttgaaaatttggttacgtggctgggcttggtggctcatgcctgtaatcccagcactttgtgaggccaaggtgggcagatcacttgaggtcaggagttcaagacccgcctggccaacatggtgaaaccctgtctctactaaaaatacaaaaaattagcagggcaccgtggtgcacgcctgtaatcccagctacttgggaagctgaggcaggagaattgtttgaacccaggaagcagaggttgcggtgagctgagatcgcgccactgcactccagcttgggtgacagagtaagattctgtcccccactccaaaaaaaaaatttttttgattacatgtcaattaagcagttagtgttttttttttttttttttttttgagacagaatctcgctctgttgcccaggctggagtgcagtggtgcgatctcggctcactgcaagctccgcctcccgggtccacgccattctcctgcgtcagcctccggagtagctgggactacaggctcccgctaccacgcctggcttatttttttgtatttttagtagagacggggtttcaccatgttaggcaggatggtcttgaactcttgaccttgtgatccacccgcctcggcctcccaaagtgttgggattacaggcgtgagccaccgcgcccagctgcagttagcgtttttattttgccactagattaactgctagctctggaggaatatatcatgttgtttgttttatgtttttttcttgtctttatttaaaaacaagtgcagtattgagaagggaaaagagtagaacaargggtttggcctgtaactgactgaacaatcaggtgatataactcactacctttggaccagccttgtgttgttttcttttaatcgagccataggaggcttaatcatgatggtgtgcttgaagatgaatgagcttgaattatctgagaccaaaaacatnttgccccactagggccgggtgtggtggctcatgcctgtaatcccaacactgggaagctgaggcgggcagatcacgaggtcaggagattgagaccatcctggctaacacagtgaaaccccgtctctactaaaaatacaaaaaaattagctgggcatggtggcaggcgcctgtcgtcccatctactcgggaggctgaggcaggagaatggcgtgaacccaggaggcagagcttgcagtcagcagagatcacaccactgcactccagactgggcaacagagcgagactccrtctttaaaataaataaataaataaacaaacattttgccccacttaatcttcaatgaacttgttcctattagttaaaaattctaactagatttagtctttcttcatatatttgctttaggaggcaaactctgacaggcgagtttatctttttggatcctaaatgtgatttttctccctcttcattgggaaacacaaatggayttcttttttatttttaaattgttgaatacttcaaatcttgtgatttaaaaatttttttatttataggagtattttatacagaaatcttgtgaaaccactgcccaaccagagcaatgattgttcaaagagtggtattgaattctcgacctggtatgtatttgcgatgaatgaacaactctgatctttgataagtattaakgcaaatggaggaataaaaactaatgtgatgttcatgtggtaaattaaggtagtaagatattgacactagtaaagatattagaagaaactctttaaacgatgtaataattttcaagtgttagcttatcaagaccatttttaaacagtgtgctagtttttcaagtgataacttatccaggcatttgttgatgaaataaggtattttggaatcataatgtctgaaaggttacattacaaatatrtgtggcttttgtttctttagagtatgttattattggtccttaaaatttgcttttcttttttatgtgaaatgtactaacatatcagtgctgacatgtaaactgcatcataaaaacagatatggaaagaacctgagagatttgggtcactgctgcccacttgaggaagtcacttaacttttctgaactcaattttagtaaaatgagcagttagattaagatctttatgtactattcccaccttataaatttaacaattctatgaagagtaaatttgcattaaacatatctgaatatgagtaccttctagtggtaacctttccttcttacaaatttttctcatacctcaaatttttctaatttcctacttcctattttttcagacttcattattattacttttatattcgtttaagtttctataatgatgacctttccttacaaatttttctcatgcctcaaattttttaattttccactttttcagactttattattattacttttatattcatttaagtttctatttgcttcttaaaataaggaaggaaagtttagccgcgctccatcctgggtgacagagtaagaccttgtctctaaaaaaaaaaaagaaatacatactgagtcatttctatagttacagaagaattacaaaacaatatagatttacttgtgcctgtttttttttttttgacacggagtctcgctctgtcatgcagtggcacaatctcggctcagtgcaacttccacctcccgggttcaagcgattcttctgcctcagcctcccgagtagctgggactacaggcgtgcgccaccacgcctggctagtttttgtatttttggtagaatcaaggtttcaccatgttggccaggctggtctgaaactcctgacctcgtgatccacctgtttcagcctcccaaagtcctggggttacaggcatgagccaccacgcctggccccttgtgcctgttttaaaaggaactgttctgaatcctagagtgaccctttaaakaataataagtatatcccaccactatgggaggccaaggtgggcagatcgtgaggtcaggaattygagaccagcctggccagcatggtaaaaccccatctctactaaaaatattaaaaagtagccrggcatggtggtgcatgcctgtaatcccagctactcgggaggctgagtcaggagaatcacttgaacccaggagkcagaggttgcagtaagccgagatcgcgccactgcattccagcctgggtgatagagcaagactctgtctcaaataataataataataatagtatatagmaaagtggctttttttaactttatatttttgcataatattttaggaaaaaatggtaatccagtggcagagaatttccgaatggaagaagtctatttaccagataatattaatgaaggacaagtacaagttagaactctttatctttctgtggatccttacatggtaagaatcaggatgttgtaacttggtgaaaaataactttattttattatttttcatgttgtatctgaatcttattgtgcagtcccttatagattggtaaatatttgagcagttatatattgataccttttarttatagattgcctttgtttttattcactagtgtaattaaggaatgttgtagagggaacagataatagtagtacatgtatgtgattcaggtgctttcaaatgttcagattacttcccagtagtaaatamagcttgaagatagtaaaacaggattgcaaattcagtaaataaagctttaagatagtaaaataagattgcaaattctttcagatccactttataagagaggctatgtatgagatctttatttatttctagttgacctccttttcttttctttttcttttttttaagcgatgaggtctcgctgtgttgcccaggctggtctcaattttgctgggctcaggcaatcctctgactttggcctccttgaagtgctggcattacaggcatgagccactgtgcttagccctgtagttgatctctttttgaaaggaacagactcacttatgctacttctagataaataagatttagtgaaaacgtatacattgctgaagactgcagataagaagccattaggcacagggactttggctctacgagctggcgtcttgctttacttctcccagaggtcatacagtcttttctttacttctaactttttcctatggccatgacaagcataactctttatgtcaatttaccccctgctattaagaggctcagctgggcatggtggctcttgcctgtaatcctagcatttttggaggccaaggcaggattgcttgagcccaggagttcaagaccagcctggacaagagagtgagacccagtctcaacaaaaaattaaaaatttagacaggtgtggtggtgtgtgcctgtagtcctagctactcgagaggctgatgtgggcagatcgtttgagcctgggaggttgaggctgcattgagccatgattgcgccactgcacttccgttcgggtgatggagtgagaccctgttgcaaaaaaaaaagtctcagtgcttggaatcagattggtgcagtagggaaattggccccatgtgtctgttttgttaactgtttcataggttgctgaacgactgtatgagtttcctgttgctgttttgacatagtactgtaaacttagtggcttttttttttttgggacggagtctcactctgttgcctaggctggagtgcagtggcactatcttggctcactgcaacctctgcctcctgggttcaagtgattctcctggctcagcttcccgagtagctgggattgcagtcgtacaccaccacacccagctaattttttgtatttttagtagagatggggtcccaccagactggccagcctggtgtcaaactgttcttttttttttgttatgtagaggctgattatctttttcattattgaagacatttttaaaaaatgagcaactttattatttttattaacttttttttttgttgtttgtttgtttgtttttgagacagagtcttgctctgtcgcccaggctggagtgcagtggcgcgatctcggctcactgcaagctccgcctcccgggttcacgccattctcctgcctcagccacccgagcagccaggactacaggcaaccgccaccacgcccggctaattttttgtatttttagtagagatggggtttcactgtgttagccaggatggtcttgatctcctgacctcgtgatccacccgcctcggcctcccaaagtgctgggattacaggcgtgagccactgcgcctggcctatttttatcaacattctaaatagttgaaacagaagtatataaagtaggaagtgaaagagtgcccgtacaaaggatcgcttattgatctgctgtctaggtaacagcaatgtaccaatgttaatgtcctgcttttgatattatattgcagctattaaagacgtcactactgcggcaagctgagtgaaggactgtggacttcattttattaatttttaacttttttgaaatgagatctctattgctgaggctgagtgcagtggtgtgaatacagctcactgcagcctcgacctcctgggctcaagcagtcctcccatctcagcttcccaactagcagggaccacaggtatgcaccaccacacccggctaatttttttgttttttgtagagatggggtcttgccatgttgcccaggttggtcttgaactcctggactcaagcaatactcttatcttggcctccaaagtgctgagatttcaggtgtgagccactacatctgtctccatatacttaaaaaatttaacagttttattatattcacacactatacaatttactcacttaaagagtacaactaaattatttttagtatattcacggaattctgcaactgtcattacaatcagttttacaacattttcatccccagaagaaaccctgaacctatggtataattagcaatcattccccatttcccctcctcaccccaccctctgctgtatacaaccagtaatctactttttgttcctatagatttgcctattctggccatttcatataaataaaaacatacaatatgttattcttttttgttgtttttaagagacagagtcttgcactgttgcccaggctggaatgcagtggggcaatcatagctcacggctgccttgaccttctgggctcaagcaatcctctcacctcagctgagagctcttgagtagctgagaccataggtgtgtgccaccatgcccggctaattaaaattttttaaaaaaacattttaaaattgtttatttatgaatcattgcaaagaataaactgttatttatttatttatttagagatgagttctgttttatcttttgtcatttatactctcatactttcaggctctctttttttttttttggcagacagtttcactctatcccccaggctggagtgcaggggctcaatctcagctcattgcaacctccacctcctggattcaagagattctcatgcctcaacctcccgagtagctgggattaacaggygtgcaccaccacacccagctaatttttgtatttttagtagagatggggtttcaccatgttggccaggctggtctcaagctcctgacctcaggtgatccacccgcatcagcctctcaaagtgctaggattacaggtgtgagccatcacacctggccgactcatatctaagaaggcttttccccacccaaggtcacctcttgctatgagacagcccaagctggtcttgaattccagggatcctcctgcctcagcctcctgagtagctggggttgtaggtgggagctactgtgcctggcataatatatgaccttttgtgtctggcttctttcatttagtatgtgtttacaaggctcatcatgttgtagtttatacttctttttattgctgaataatgttacattgtatggatacagtatcttatctgttcatcagatgatggacatgtgggttgtttacacaacttggctattagcaatacttctgctatgaacatttgtgtatatgtttttgtgtggactgtgtttttgtttctcttgggtatatacataagagtaaaattactaggtcatacagtaagtatatgtttaaccttttgaggaactaccgaactattttccaaagtggctttaccattttccaatcccaccatcagtgtgtgaaggttccagttttccacatcctcactaacacttgttattatctgtctttttggttatagccattctagttggtgtaaagtgatatctccttgtggttttcttttgtatttccttatggctaataatgttgagcatgtttttaatgtgcttattggtcatttgcatgtcttttttggagacatgtctattcagatttcttgtgcattttaaaagttggattatctgtgtttttattactgagttgtaagagttgtttatatattcttgatataagcttcttgctggatgtatgatctataaatattttcttctatgctgtaggttgtctttttattctcttgatagtatccattgaagcacaaaagtttttaattttgataaagtccgatttatctctttttttgtttgtcacgtatactttcaatactttcagactcatatctaagaaggctttgcctcacttaaggtcatgaagatttagtcgtatattttctgctaagagttttatagttttgctctaacatttaagtcagtaacacattttgggttaaactctatgtatgcgtatgaggaaggggtctgtattaatcaagattctttagagagacagaaacacaaacacacacataggcatgcacccacagacatgcacacacatatatatgagaggggacttataagaggaattggctcacaagattatggaagctgagagttcccatgataggctgtctacaaactggagaaccagagaagctggtagcatggctcaatccaagctggaaggcccracaaccaaggaagccattggtatacttgtcagtcccaaggcctgagagcccaggaagccatgggtgcagtctcagagtacaaaggctgaagaacctggagttcttatgtcagagggcaggagaagaagggtgtcctgctttgcaggagagagagagaatttgtccttcacctgcttttttgttccatctgggctccttgttgaatggatggtgcccacccacattgagggcagatcttcaccacatagtccacagactcacctgctagttacctctgaaaacaccctcaaggacatatccagaaacaatgcttcacaagccatctaggcattcctctatccagtcaagttgacgcctaaaattatccatcacagggcccaactcattcttttttacaatctcaaactccctgggctcaagtgattctcctgtctcagactcccaagtaactgggacgataggtgcaagccaccacacctgacctaacttcactcttttgcaagtgaatatacagtcgtgtcagcactttttttttttttaagrgagaccagaaatatttgaccaygaagggacatgaaccagcactgtttgttgaaaagataattctttcctcattggtttgtcttagtactcttgttgaaaaccaactgaccataaatatgagggtttatttctggactttcaactctattctagcaatctgtatatctgtcatgctagtacctcgctctcttaattactgtagctttgtaataagttttgaaatgagcaagtgtgagtcttccaatctgtttttctttttttttttttgagatggagtcttgctctgtcgccagtctggagtgcagtggcgctatcttggctcactgcaacctccacttcccgggttcaagtgrttcccctgcctcagcctcctgagtagctgggactacaggcacccaccaccacacctggctaatattttgtatttttagcagagacggggtttcaccatattggccaggtgggtcttgaactcctgaccttcaggtgatccacccacctcggcctccgaaagtgctgggattacaggcatgagctactatgcctgaacaattttttgtattttagtagagacagggtttcaccatgttggccmggatggtcttgatctcctaaccttgtgatcctcccgcctcagcctcccaaagtgctgggattacaggtgtgagccaccccacctggcctgtttttcttttttaagattgttttggctcttctgggtcccatgaattttcatatgaactttagaaccagcttgtcagtttctgcacagaagattttgatagggattttgatagggattgctttgagtctgtagatcaatttggggagtattgtcttctgtgatggttcattttatgtgtccacttaactaggccatgggatgtctaaatagctggttgaacgttatttctgggtgtgtctgcaagggtgtttctagaagagattagcttttggattggtggactgaaaaaagcagatgtccttctctaatgtgggtgggcatcatccagtccattgagggcctaaggagaacaaaatgtagaagaaggttgctgggtgcggtgtctcacacctgtaatcccagcactttgggaggctgaggcgggcagatcacctgaggtcagacgttcaggaccagcctggccaacgtggtgaaaccccgtctctactaagaatacaaaaattagcygggtgtggtggcaggcacctgtaatcccagctactcaggaagctgaggcaagagaattgtttgaaccygggaggcggagattgcagtaagccaagatcgcggcattgcactccagcctgtgtgacagagcaagactctgtctcaaaaaaaaaaaaaaaaaaaacaaaaaaacaaaaaaaagaagaagaagaaggttgaactaactctgactgcttaagctggagcatcattcttctcctgtcctcagagttcctggttctcaggccttcagatctggactagaatctctactgtcagcttacctgctctcattcactggaaccacactgctggcttttctgagtcttcagcttgcagatggcagataatgggacttcttagcctctctaactgcatgagccaataccttataataaatctcttcatagatatgtatgtatcctgttggttctgtttctctggagaattctgatgaaaacaatatcctaatacactgatccatgaatgcatgatgtctttctacttatttgggtgttcattaatttctttctgtctttaaaaaaaaaagattttaggggaggaaaaatgatggaacaactaggattataatataaattgaattaatgatcttcacttcgaacactcccaacttcaaagcaaaaacaaaaaccaaaaaacctctttttcctccagggaagtaaatattttgtctacttactcatttcatgctagaaagcacagtcttgagaattttgcctctaccaggtcctgtggatcccacctcctaaatacctctcaattcagtccatgtcttagtaattccagggaagtctacctagtctgaatcaccgttgtttctttcctaatggggtaggtacccttgcatacacactttgcccctttaagccatttttcacactgcagccagaatgccagagtgattcttcttataacagcaactaattgtgtcaccttgcttaaagtggtttaatggcttcccattagttttggaattgagaccaatcagccttgacatggtctaagaagctacataacctgggctaggcacrgtggctcacgcttgtaatcctagcactttgggaggccgaggtgggtggataacctgaggtcaggagtttgacaccagcctggccaacatagtgaaaccccgtctctactaaaaatacaaaaaaattagccaggcgtggtggcacatgcctgtagtcccagctacttgggaggctgaggcaggaaaatcacttgagcccgggaggccgaggttgcagtgagccgagatcacgccactgcactccagcctgggcaacagagcaagactctgtctcaaaaaaaaaaagaagctacataacctgactcctttacctgtccaggctcagagaagcctgccaattaccctcacactgttgcctcagtggatgtctgtcttttgtaacacatcagtgcccccttctgcttaatctttgtatgaatcatgtttttaatttagtgtattttaggatgttttgacatcttagggggcttgtgaatcctagagtaactgtccctggcrggatttgcttatttttagagataacaacttgcatttgagtcttgccattcatatacaaaccaaccaatccaaagcccatatccctaaactcctcctctatctaactcacactcccctgccttaaatcacctcagggccagatgctgcacaacttaagaaccacccctgtatatcagagccctctgacattattaaagctgtcatgtaatatactcaaggttacctaccctgccttgcccgttctttcctgtggaaaccaaagatacttcttccttaaaaaaaaaaaagaagactctgggccatgctcttccttgctcctttgccctcttgaccaactcttgtgcttccccatgcgacccttcttggcatattgtgccctcccctctcggcaactgtaagaaattcttctttcaaggcagttgtcttcgtatctatcattttaccatacctggttaaaacagagtcccaggtacatattaaagcaagccttcatacatgttggccctctatctaaaagcctcttcccactcctttccctttacctggtaatccctgttattccctagatgcctgctttaaagagatttcctttggtaaatcaccctgaaccctcagactagtccagacctctctttgatattttcctcttgacattcagcatttatcccaattgaaagtaataattacatttgtgtagttattagattatctgtcttccttagtaaaaagtaagcttatgggctgggtgccatggctcatacttataatcccagcacactgggaggctgaggcaggaggatcacttgaccccaggagtttgaaaccatcctgggcaacacagaaagatgccatcaataccaaaaaaaggaaattaggtgagtgttaaggtgcaccagccactctggaggctgaggygggaggatcacttgagcccgggaggtgggaggatcacttgagcccgggaagtgggaggatcacttgagcccaggaggtcgaagctgtagtgagctgtgatcatgccactgcactccagcctgggcaacagagtgagaccgtgcctcaaaaaaaaaaaaaaaagtttatgaaaacaaagttcgtatttatcactgtatctccagtgactagcataatgtttattaaatgttaattgcataaaggaaggaagaaaaatcactttgggatactttcactagacattctctatgcctcattcctttaaaaaaaataatcaggctgggcgaggtggctcatgctggtaatcccagcattttgggaggctgaggcgggcggatcacttgaggtcaggagtttgagaccagcctggccaacatggtgaaacaccgtctctacgaaaactacaaaaattagccaggcgtggtggcatgtgcctgttatctcagctactcaggacgctgaggcaggagaatcgcttgagccggggaggcggaggttgcattgagctgagattgtgccattccactgcactccagcttgagtgacagagactccgtctcagagagaaaaaaaaaaaagaatcagctgggcatggtggcttgggcctgtaattccagctacttgggagacttgaggtgggaggatggcttgaagccatgagttcaagtccagcttgggcagcaacgcaagaccccaactctaaaaaatagaaaaatcttaagcaaccttttttttttttttttttgagatagagtcttgctctgtgcagtggcacaatctcggcttactgccacctctgcctcccgggttcaagtgattctcctgcctcagccttctgartagctgggattacagatgcctgccaccacgcccagctaatttttgtattttttagtagagatggggtttckccatgttggccaggctggtctcaaactcctgacctcaggtgatctgcccgccttggcctcccagagtgctgggattacagacatgagccaccacaccagacctcttaagcagctttaaaagggaaaagggagtctaacaaacattaaataattgagattttatatcattccaaattcacaactaaaattaatcattatgtgtacacagtattttacatgattatccttaatgtgcatatacaacttggctttcatattctttttattctttttaaaatttttattttcatttgacagagaggagtgtcttactgtgttggccagtctggtctcaaagtcctggcctcaagcgatcctcctgcctcagcctcccaaagtggtgggtttacagatgtgctttcatattctttaagtgactttatatggaaaaactagttcaaatattattattttagtggttaataacattctgttctgttgacatcatttgtttagctatagggaattacttgtgtgatattgtgatttataataggaaatatttggtcttcttgctctttgctggcacacaattcctaaagcccttggaatctccaaggtgtctttttgtattctaatgagatgacaagtggttgggagctcctggatagcctcaggatgggggctggttaccaaggcaaccaaccatatgatcagagggttggaacttttattcctaccaccttacctccaggtaggggacagcaggtgaaggttgagtttatcaccaatggccagtggtttaatcaatcatgtctatataatgacgccttcatcaaaacccaaaaggacctgattgaggagtttccaaatagctgaacacatggtgattcctgtagggtggtgcacctggagagggtgtggaaactccacgccttttcccatataacttaccccatgcatctcttctatttggctgttcatcttttttttttttttttttttttttttaatttttgttctttttttgtctttttaaaaaatttttattatttttatttggctattcatctatatcctttgtaatatcctttataataaacagtaaatgtgagtaaagtatttctctgacttctgtgaggtgctctagcaaattaaaccaaaggagagggtagagtggggaccctgatttatagccagtttgtcagaagcacagaccataacctagggcttgagattggcatctgaagtaggtgcagtcttgtgggactgagcctttaatctgtgggacctgacactatatccaggtagatagtgtcacagttgaactgaatggaattaggggacacccagttgatgtcctctgcagaattgcttggttggtgtatggggaaatacccctccacatctgtttttagaagtgttgagtggtgagtgaaaggaggaaaaagtagatttttttcctatatctcagagagcttatttccatttttcctactagctgtgtttaagtgcccttggtctggccagtgtctatggctgcacttgcttttaaggaatacgtgggaggtggcacacaagcagaagcaaatgtattcttacagaagcttctgcatcagttctctgtttcgtcttttacccgttttacctgggtacaccgaaccacatgggaccccttaatcaggtgtccttccatgttttccatttcctggtccgtgctgtsgtcctctacattttggatttcatgatagaggcaagagtgagccacagaggaagagagccttgactgctaccaagagaagttgttagccttcctcttgagatrgggtgcrgtcccattgtgacattctgtctttgaggggtgaagagagcacttatctgaggttagggggcatgaaatagggagcgtacttggtctgaagttgggatgagcaactgtataaaattcacttcacttctttttgggttatttccactggggagacagaattgctagcccaaaagaaatcaagttttatggtgtatatgttgctagtttgttttccataaaaaatagttttataatatcagcaacatgtgagtgtaacctaattggccacaatcctttgaaaccatcaaaacactattttgtattattttttgctggtataacgtgtataatattacttcagtttccttaagtaattcttttaaatttttagctttattcactagcatacatttcatgcatttaaatgtacaattcagtgaattttggaatactcacagagctttgcaaytgtcacctcagttttttaattttttatttaaaaacaaatttattgacaaataaaaattgttgccaggcatggtggctcacgcctgtaatcccagcactttgggaggccaaggccagcagatcaacgaggtcaggagttcgagaccagcctggccaatatggcgaaactccgtctctactaaaaatacaaaaattagccgggtgtggtggtgcgtgcctgtagtcccagctatgcgggaggctgaggcagaataatcgcttgaacccaggaagtggaggttgcactgagcccagatcataccactacactccagcctgggtgacagagactccatctcaaaaaaaaaaaaaattttttttatggtgtacaacatgatgttttgaaatgtttacaggccaggcgtggtggctcatgccagtamtcccagcactttgagaggctgcgggcagtacacgtgaggttgggagttcgagaccagcctgaccaacatggagaaaccacatctctactaaaaatacaaaagtagccaggcatgttggcacatgcctctaatcccagctactcgggaggctgaggcaggagaatcgcttgaacccaggaggcagaggttgcagtgagcctagatcgcgtcattgtactccagcctgggcaaagagagcgaaactccatgtcaaaaaaaagaaaaagaaaaaagaaatatgtttatattgtgcagtggctatatcatgctaacatgctaattaacatggattatatcacatacttattgtttgtggtgagaacacttagaatctacccttatggcaagtttctttttttcttttcttttctttttttcttttgagacggagtttcgctcttgttgcccaggctggatggagtacagtggtgcaatcttggctcactgcaacctccacctcccgagttcaattgattctcctgcctcagcctcctgagtagctgggattacaggcacccgccatcatgcctggctaatttttgtatttttgyagagatggggtttcaccatgttggccaggctgttcttgaactcctgacctcaagtgatctgcccgcctcagcctcccaaagtgctaggattataggcctgagccaccgttcccagccagtgacaattttcaagtatacaatacattgttagccactgttcccagccagtggcaattttcaagtatataatacattgttattaactrtagtcactatgttgtttcaggtcttatgtttaagtcttgaatgtattttgagttgatttttatgtattgtgtgcaatatattactcattatatgcttttagtcattgggtaaattagtagagtggtttgacattattggataaaattatcttaatgttttcttttttcagcgttgtagaatgaatgaagacactggcactgattatataacaccttggcagctatctcaagtcgttgatggaggaggtattggaattatagaagaaagcaaacacacaaatttgactaaaggcgattttgtgacttctttctattggccctggcaaaccaaggttattctggatggaaatagccttgaaaaggtgatatatatatgaacatatctgattttttttccccgtataattcttactttgtgcatttgatattcagttgtgtttgtaatcagggaaaaataaaagcatatattttcttttagctagctgccaaaatgtggaaagcctttgttccttttccactgttagctgtgtagggaagtttaaattgtccttctgaaggtttgataattgagcstgctaaaataaactgacaataaacagattaacaggagaaaaaccattttaattcatgtatgtgcactggagcctcacagaagaataggagactcaaaggagggaccagatggttgaaggtgttctttatttgtttctttgcttgtttgtttgttttagagatgggttgtcactgtgttgccccggctggtctcaaactcctaggctcaagcaatcctcccacctcagcctcccaaagtgctgagattacaggtgtgagcttgaagtttttatagctaaaggaatggggcttgaggtttttgggggaaatggcaacaaaaagggaaaggggaggaattgcatggtaaacaaaggttatcttattgtagataaagtctctcaggtaataaaagttgtttcagagcagctgccaaaagaataggtaatagcctgactgggtctgctaatgactttatttatttagagacggcgtctcactctgtcacccaggctggagtgatcttggctcactgcaacctctgcctcctgggttcaagtgatcttcccacctcagtctcccgagtagctgggattayaggtgtgcaccaccacgcccagctaattttttttatttttagtagagatggggttttgccatgttggccaggctgttctcaaactcctgacctcaagtgatctgtctgtcttggtctcccaaagtgctgggattacaggcgtgagtcactgcacccagccatttttattaaacttgttgtagaaacaagagtcttaccatgttgcccaggctggtcttgaactcctggcctcaacsgatcctcccgcctcagccccacaaagtgctgggattacaggtgtgaaccactgtgcccagccttaatggtacattttaagcattagtaatgagaactgttggagtttgagttgatttttttttttttcaagacagagtcttgctctgttgcccaggctggagcgcagtggcgcgatctcggctcacttcaacctctgccacctgggttcaagcgattytcctgcctmagccacctgggtagctgggattacaggcgtctaccaccatggctggctaatttttgtatttttagtagagatgggatttcagcatcttggccagggtggtgttgaatgcctgacctcatgatccacccgccttggcctcccaaagtgctgggattacaggcgtgagccactgtacccggcctgagttgatatttataggtacatgtttatgttggaattgctcagagacttaaagatcttccattgttgccaagtatttttctgttaagcacttcctttttttttttttttcccatacttggggcattaacaagaaagaatattttgtctcttacatgggaaattttttaaaagtttctttttttttttttttttttgagatggagtcttgctttgtcgcccaggctggagtgcagtggcacaatcttggctcactgcaacctccacctcccaggttcaaacaattctctgcctcagccttctgagtagctgggttttgggcacccaccaccacacctggctaattttttgtatttttagtagagacggggtttcaccattttggccaggctggtcttgaactcctgaccacatgatccacccacctcagcctccttaagtactgggattacaggcgtgagccaccrcacccggccttaaagtttctttaatataaagagaagtaatattgttttttactctttacaaataaagtatagaattttagcaagactgatgaatggtttactcttctataaaccatattgggttatttattatactgatggactgccataacagagtactacaggctgggtggtttaaacaacagaaatttattttctcacagttctggaagctaaaagtccaagatcagagttctggaaaatttggtttctggtgaggcccctcctcctggattgcagatggctgccttcttgctgtgtcctcaggcagtctttcctctgtgggtgtgcagagagatagatcttgtttcttcttcttctaaggacataagtccttttttttttttttttgagatgaagtctaactctgtcgcccaggctggagtgcagtggcatgatctcagctcactgcaacctcctgggttcaagcgattctcctgcctcagcctcctgagtagctgggattacaggcgcatgccaccatgccttgctaattttttgtatttttagtagagatggggtttcgccatgttggctaggctggtctcgaactcctggtctcaggtgatccgcctgcctcggtctcccaaagtgctgggattacagatgtgagccactgtgcccggcctggacacaagtcttgttggactaggaccccacctttatgtcctcattcaatcctaaatgtctcctttaagtgcctatctccaaataaagtcacactggggcttagggctttactatataaatgttgtggggaygcaattcagtccataacacgttgtctctactttgttgtctcaaaacaggaattcctagtatttttaaagggtatatattttattttaggtagacccacaacttgtggatggacacctttcatattttcttggagctataggtatgcctggtttgacttccttgattgggatacaggaaaaaggtcatataactgctggatctaataagacaatggttgtcagtggggccgcaggtgcctgtggatctgtggctgggcaggtaaactttctgagaattatttgattttctgattatttgacgattgttataattcttaattgaaattccggatatatgtataccattaaaaatataaaattggataaattttttttttcttttttgagacagagtctccaggctggagtgcagtggcgcaatcttggctcactgcaacctccgcctcctgggttcaagagattctcatgccttagcctctagagtagctgggactacaggtgtgtgccaccacacctggctaatttttgtatttttagtagagatggggttttgccatgttggccaggctgttctcgaactcctggcctcaagagatccacctgcttcggcctcccaaagttctgggattataggtgtgagctaccacgcccagccaaaattgamtaaatttataatgactttcacacgtttcttgtagaaatggttttttttttttacctacttagactctcttactaacagtatgaaaaatgtagattttagtgtcttattctctgttaaccaaaaggagatatagtaaatgctaaagctttgctttcattattataaggaagagaatgatagagaagctgtttggaattgcatgaattaaaagtcaaactcacattttaaattaatatcctcaaataagaaaccacttattgaattctagaagtgtaaacattttgatagaattttatgaagtcggcctggcacagtggctcatgcctgcaatcccagtgctttgggaggccaacttggcaggattacttgaggaaaggagcacaagaccagcctgggcracatagtaagactcttcagtaaataaattagcccagcgtggtggcacgcctgttgtcctaactacttgagaggctgaggcaggaagagtacttcagcccaggagtttgaagttacagtgagctatgattgcaccactgtactccagcctgggtgacagaccctgtttctttaaaaaaacaaaaaaagaatcttataaaagtacatccttttataaataatagcctttataggttgaaaccattgaaaacaaacattgtgtccgagctgtgattttagttcgccacaagcttgaaaaataatgaattgcacgtgatgttttgggtctgattatttattccttttatgaaatcagatttaatttgcgaaattttatttttttaaatttaattattattctttgattttatatttttcaatgagtgaaagccaaaaattgtgagattttaacatttaaactacctatggtccccaacttatgatggttctactttacagtgatgcaaaagccctatgcattcagtggaagccatactttgaattttgaattttggtcttttcccaggctagcgatatcagtatgacactctctcgagatgctgggcagcggcaacaagctgtagctcctggtcagccaccgtatgtggctgaacaactccgtgaatcatgcccagctggagtggatgtttattttgacaatgaccataagggtaaacaactggtactctacggtgtactgtgttgccagatgattttgcccagccataagtgttctgagcatgttttaggtaggctaggctaagctatgatgttcagtaggttaggtatattaaatgcattttttgcttaggatattttcaactaatgatggttttattgggacatatccctatcataagttgaggaacataagtctacctttgttcaattttaataatttttttttaggatgacattgtctgccctcagttcttttagtttcaaattacttttcattaaaagcagcgtaatctaaccttaattgtaatgaacactgtcatatacctgtaatatcttgtatactggtacatttttacatttaaatgtgacaatataaagccatttaatcttcaaatttcccccctagattggccatttcttaggttgttccagagtggtgggaatttgtggaacacatgagaaatgcatcctcttgacctcagaactgggctttgatgctgcaattaattataaaaaagacaatgtggcagaacagctccgtgaatcatgcccagctggagtggatgtttattttgacaatgttggtggtaacatcagtgatacagtgataagtcaggttgtttgctgatttctataacaaatttgaatactgcactttatatgttgtgatatctttttacctaatactgagaaaaaaatttataaaattggagggattattgtgacttaatgtgatgatcagtattgtatttaagtgatacaaaagagcttgctgatacctacttccatttacttgcagatttgtactatgaacttcaatttcagttatttgctaccaatattatatttttcacttttggtttatttttgtgaaaaattacagttgcattgttgaaatgctgaagcactgatccctaactcaccactgaccaactcacagccatggccccagaccttgcggatgggtttcataggctgcatgtatttatgcatatttactaacaatattataaaatatcaacatgaggtattaacactacatagtcctttgctgcatctaaaattatttgcagttgagattattaaattgtttaaatccaaaaaaatacagttctaccactaataagtagcaacaacaactaatgtaattcttttgctgattaccaaccatttatttgccttggtgttcctttggaatgtaattatttctagctagttaaaattcttaaatacctctaacaggtaaattaaaaaaaaaatcgaactagttgacagaaaggattaaatagtcaaggaggcttccattatggcagccataaaatcagtaaacataggaaagggatattttatcattatttttctctgtgcagatgaatgagaacagccacatcatcctgtgtggtcaaatttctcagtacaacaaagatgtgccttatcctcccccgctatcccctgctatagaggcaatccagaaagaaagaaacatcacaaggtgtgttcttcctctttgcccttattaccaggttcatggggttttaaatatcatagatgtgtatgaaatctattgttcttcatagacactttttctttattaaataaaactttaggtcgggcatagtggcttatgcctgtaatcctagcactttgggatgccgagacgggtggattgcttgaggccaggagttcaaaactagcctggccaacatggtgaaaccccttctctactaaaaatacaaaaaaattagccgggtgtagtgatgggcgcctgtaatcccagctacttgggaggctgaggcaggagaatcacttgaacctgggaggtggaggttgcagtgagccaaaatcatgccactgcactccatccagcctgggcaatgaaaacgaaactccatctcaaaaaaacaaaaaaaaaaaaccaaaaaaaaacctttaaaatacacattttttaagctggttcaatatttaggttctggctaactagctacctgaaaactgatagttattggctttgactggcctgggttaagtcacatgagggtcgagaaaggatgctacccacaaaggaaaaattcacggtgctattaacaaatggggttgtagatactgggcagacaaaaattattattatttgagatggagtctcgctcagccgcccaggctggagtaaagtggcgcgatcgcagctcactaaaaccaccgtctcccaggttcaagcgattctcctgtctcagcctcccgagtagctgggactacaggcgctcactaccatgcccggctaatttttttgtatttttagtagagacgggggtttcaccgtgttggccaggctggtcttgaaaaattattaatagaagtctacatttacacctgtaactatgcataaaactatctgatcagactcaatgtgttatgtcctaatattttaaggattaacagatattagaattctggaatggtttgatcttggaataccactcccgttatattctctgatcattatccttttcttcctcactgcagggaaagatttctggtattaaattataaagacaaatttgagcctggcattctacagctgagtcagtggtttaaagaaggaaagctaaaggtagaacttctattctttatcaatataattcttcctgctacttgatataattttgcattatttaaatgtactatagcaaacatactagtttcattataaaaattcctacaaaagaaaagtatgctgaatattataaattaactctacctcccaggtgagtataacctcctgatcaacaaacccttgcttgttattccctttatctaaaattttttagctttactttccatagattatattacaaaatcattaggttttcccccaaatgtaaaattatgtttattaatttaacaaatatttatgggatgctactatgtgttagaagctgtgctttctcaaaaataatgtgagcacctcctgatgcttataccaccatacttcttccctgtcctccctggacattctaatgtatgtcttagttgttgatcgaaaatcaggagttattaatctgggcttcagacatactggcctaggctattctttttttttttttttttttttttttttgagacggagtctcactttgtcacccaggctgtagtgcagtggcgcaatctcggctcackgcaacctccgcctcctaggttcaagcrattmttctgcttcagcctcccgagtagctgggattacaggcacatgccactcgctcagctaatttttgtatttttagtagagatggggtttcaccatgttggccaggctggtctcaaactcctgacctcaagtgttctgcccatccagcctcccaaagtgctgggattacagttgtgaaccagtgcacctggactggcctaggctattcttgaaacctgcaaatgatargcaaagttgtacctttgtgtgcttctgtactgttctttttctgttttagagtgtatagcttgtgatctgttactaattgaagagattaaacaatgggaaaataggatattactttaaaaaatcaattgataggaagcttttctgggctacctacatgaaataaagaatatctatttttagacaaagtgctaaatagtattgctggcttttgtaagtatggaaactatcatatagaaacattgaagtttaaagactattaaatctagctattttgatttacagattaaagagacggtaataaatgggttggaaaacatgggaggtaagatgaatgtagacttattatatacacatgctcagcacacaaagataaagtctctttatttttatttatttatttttgagacggagtcttgctctgttgcccaggctggagtgtagtggcatgatctcagctcactgcaagctccgccttccaggctcacgccattctcctgcctcagcctcccaagtagctgggactacaggcgcctgccaccacgcctggctaattttttgtatttttagtagagacggggtttcactgtcttagccaggatggtatcgatctcctgacctcgtgatctgcctgccttggcctcccaaagtgctgggattacaagcgtgagccaccacgcctggcccttttttttttttttttttttttttttttttttttttttgagacggagtcttgctctgtctcccaggctggagtgcagtggtatgatcttggctcactgcaacctccacctcccgagatcaagcaattctcctgcctcagtctaccaagtagctgggactacaggcgtgcactggtatgcctggctaatttttgtatttttagtagagacagggtttcaacatattggccaggctggtcttgaactcctgaattcaagtgatttgcctgcctcggcctctcaaagtgctgggattacaggcgtgagccaccgcacaggccaaagtcttttatcttttaatgctacctctctggcctccccttccctgcccttccctcccctcacctccctttttttttttttttttttttttttttttttttttttwaaagaratgatcttgctctgttgcccaggctggagtgcagtggcatgatcatagctaactgtaacttatgaacccatgggctcaagcaatcctctcaccagagtagctggtactacaattacctgccactatgcccaaccttttttttttttttaattttccataaaaacagggtctcactatattgtccaggcaactcctggcctcaaatgatccttctgcctcagcctcccaaagtgctggaatttacaggtgtgagtgcctagccctttttttaatttttgagacagggccatgctctgtcacccgggctggagtgcagtggtgcgatcatggctcactgcagcctctacctcccaggttcaggtgatgctcccaccttagccccccgagtagctgggactacaggcacacaccaccactcccagctgatttttgtatttttagtagagatggggtttcaccatgttggtcaggctggtcttaaactcctgacttcaagtgatccacccaccttggcctcccaaagtgctgggattacagtcgtgaggccccatgcccggccttcactcacattttattcccatttttttttgcctctagtcttcagatactgtaaacaatgaacattgatgtgcataccagttagataccaattaaatctttccagtatgggcaaaacatttttttaagatgttaattgggttagtttgtrtgtaactttttacttgagatttcttttcatgaccattttcttctatgcttaatattcaaaatcattgaaaaagttatttaacataattttatatgttgtaccttttggaaacaagtatgatagtgacatttatcttttcagataacctactttctctttttccagctgcattccagtccatgatgacaggaggtaacattggaaagcagatagtttgcatttcagaagaaatctctttgtaattgctgtaaatgtcatcaaggcaatcatagatttcttttccattttgcatattttcaaagatatgttaaaaaatccttagactatacatagctcttgatttaaatgtgatcataggtgttatttttagttgcatagggtatttgatacaatcattaatggatcatacacaataggtttttaaaaattaataacttttagtaattacttttattaatttaaaatagaacrcttgagaggcactttgtaaagatttgttaaactggaaacgttttacatgatctgatacaaccattaatgaatcatacacaataggttttttaaaattaatattaataacttttattaatttaaaatagaatgcttaaaataaaatagaatgcttgagaggcactgagtaaagatttgttgaactggaaatgttttacatgattyttaaactgaaacttggtgtaaaaatagaattgagatggcctttttttcacattgtagactgaaaagagacttaatggtatgatgtgtacatagggactgggggcaggattgggggtttcggagcttgtgtaacagtttttgggataggagaccagcggttttgggttgggattagtatgggaagataaataacttaggttggttaagttgacaagatttactccagaggatcatctctttgtatttgccaaataatttactgtatagcctaaaaactccatatatattgagaaaagcatatgtttattttaggttagcaggcacatactgtcaagttgtaaagattgagagggcaaacagatgtaaacatcacttgtaggtgattaaaaagattgacagccgggcctgatgtctcaagcctgtaatcctagcactttgggaggcagaggcgggcagatcacttgaggtcaggagttcaagaccagcctggccaacacggtgaaaccccatctctctaaaaatacaaaaattagctgggcgtggtggcacacgcctgtaatcccagctactcaggaggctgaggctggagaatcatttgaacctgggagggggaggttgccgtgagctgagcttgcaccattgcactccagcctgggcgacaagagtgaaattccatctcaaaaaacaaaaacagattgacaacaaagacagtttcagaaaatgacaggactgggcaaattaacaaatgtttgtaaacatgaatgttcaggaactactgatgtacctcaaaagtttgttttattaattgtactcaaccctcgcagaacagtaaaactgaagattattgtttctgaatgttttggcttatgattgtctacacactgccaatatacttttgtatgcaacatttgtaataagtagattcaaactgtgttggtaatcagcctccccagttttcgtgagtggcccttttttgttacttttcctggaccatttcatcgcctgagggggtttcacttttctctgtatgttgctaactcccaaatctccatctgtatttctgacctctttcttgagcactggacctttacctccaagtaaatatcctcaactctggattgcatcttatactctgcttttttcttttcttttcttttttgagatggagtcttgctcagtcgcccggcgtgcagcggcacgatctcggctcactgcaacctccgcctcccgggttcaagcgattctcctgcctcagcctcccgagtagctaggattacaggcgcgtgccaccacgcccggctaatttttgtgtttttagtagagacgggttttcacggcgttacccaggatggtctcgatctcctgacctcgtgatccgcccaccttagcctcccaaagtgctgggattaaaggcgtgagccacggagtccggcctactctgcttttctaaagtggaattatcttcctctgaaatgtttctcctttattttaaatcaccattagtaatttgtgtacccaaacctgtcatcaaggcttatctttaaccttgaaaatgcctttttaaagagaactcctttaattcccacggttgagtctctcattcttccgcacgcaaatattttaaaataagtaatttcaagaagtcagtcaaactcacaaagctttaacaaggtggcatccagcttggaagtcaagtgttcaagcccgcagtcgggacatccaagagctctttacatcctaattacaacacggaacccagactcactgcataccccgtcccgtatataatgcaaaacttgattctgcaagttcctttctcgggcggtgaaacttcgaaggtcctctccatggagacctttgataaatgtttaagcagtgatcttttctttctcgtttgcctccattgcaacgcctccgctgatgggaaaaactactccctccgctactgcggggtggcagtgacgtcaacgaattagctgacctgttttttcgggcttcgcggacataggagtcccgaaggccgagagtgagtgagtgagtgggagcggggcggctgcggctcctcctgtccggggcggagccctgcgtcgcgggcctggggaggccccgccagcacccttgacgtctgggtcccgagcagtgcggcagccacacgacactgaggcgagcgagtgggtgkgtgcgtggggggtcagccaaacttcctgtcccgcgctcgagctgcttccggcgggagccggaagacgctgtgtgtggacggaattcgggaccgactgacggccggccggcttcccggaactggaaggtgagctccgaggtgggcctggccacccctcctcggttaggtagtacccgagagggcgggggccagtaccggctacttggggcctggggccgagttcgccccgagagaggaaaccgccctccttgggcatccctcctggatctggcgggcccgggagcggccagtctgaagccctgcggctttggcccttcccctcgcgggtttttaggggcgatgttcttgctcctttgcttggttttgggggtagggatataggaacagactgtcctgagaaagccagagtcagcgagtccccggggcgggggctcttggactgcacccgcagccggggcctgcctacggaccttggggccttatttctgaggcctttgtggtgtggggtagaggatgccaggaggccttgccctgaatgtttcagtccagagctaccctctcctttcataccacttactttctgggtttggaaaagggacagctgcctactcggctgggctgggtcgcccgtttctcctttgcctgtcagttcggggggcaggagtgtgtggattgtttacggccttcatacatttcgtgtcgaatttattttctgaagtttctcaagataatccaatttattaaagtttatcccacttgatcatgaggctcagaaatgcatttaggcaccatttggaagttaaatattattaacttgggacttaagaattagtacttaggttggaacgaaggtcaacgcagcatatttgcaataaataaaaaacatttggaaataaagtcgggcattttgttagggagtgagaaattgcacttggttttttcttagtgtggtgcagagtaaaagacaactaaagtagcagtcagaagttttaagttctagttttttacgttttgcatctaagtagatgtctaatttttggcaagttgctgaatctctagctctggggagtttttctgtaaacgaaggggtttacctttagggctatgacaatttttccgaggcactgaactttgagtagaagtgacataagcatttctttgttttggaaagataacttgaatggctgcataaaggatgtattggaaagaggaattttaaacgcggggtgaccagttagaggcctgttttaatagtatagtagaaagttactgagagacctaaacagggcattacagtagggaacagagaacattctgggaacagagaatcacgggaattatttaaaaatggagaatgagagagatttaaagacctagaatttgcagctgagtgggaggaagattgggcgatcattgaaataggtaatacaagaagaacaggtttggtaaggaagataataatctggattttggacattgttaggtttgagatgctgttggatatacatgtggagatacctagcaagcagttagaaatgaaggtttggagttcagaagagatgactagagaaaaatgtaggtatcatttgtagtgtcattcattcattatacaaatatttagtacctaccagttgcttactgggaagcttgtatggaagccctttaagctcatagtaaacacattagaagtgggaagtgaccgttaatgggcacagggtttccttgtgaggtgatgaaatattgtaaaattgatcgtggttctgcttgtacaactctgaatgaactaaagatattttaattgtactctttaaatgagtcaatagtatggtatgtgaacgatatcttagtgaaactaatttttaaaaaagatttacattgcagttttggaaatctgttgagtaaggaattgggaataggaatgtttaattgtgtatttgccgttacacctatagctaatgtacatagtacgttgctctgttaaagatgagatccccacagtacacttgataagatactgagtgctctagtacaaattcttttgagttcagttgcatatcttaatgcatcctgctattttttattttattcataccgtacacatacaaatcataaacttggacacaaaaattgtatggtagtacttagttataatatgaatacccagtgcttgagaaaatgctcgtgttaatttttaaagattattgaagtgaaaacactgaaataaaaagatgtcatagataacataaaaaggacagtaaatagttgtctggttcctcagagattttacaatcctggaatctcaaagttggaggaaccttaaggatgacttaaacaacaaacatctgataatttcttggcttgttaagacaagctggaattggggaagaggaattcttgttttttttgagacagcctccatttgttacccaggctggagtgcagtggcgtgatcactgttcagtgcagcctcgatctcctgggctaaagcaatcctcctactcagcctccctagtagctaggaccacaggcatgtgccaccatgtgatgctaattgaaaaatttttttttgtagaaatagagtctcactggctgagatcgcgccactgcactccagcctgcgtgacagagcgagactcagtctcaaaaaaaaaaaaaaaaaaaaaagaaatagggtctcactgtgttgcctaggctgagaaaaggaattcttaggccatggagattcagggtcaaacctagagagatgtaatcactattcacgccaatgatttctgcatacttctggtgtgggtgggagtcctggctttgcaacttaataacttggtaattaagtaatatactgagccttggttccttcctctctaaatagagggatggataaaccatatgaaactgttgcagtgcttgaataagaaaaatatgtgtggaagaaaagtcagggatttatgatactttatgtgggaaacttggaaggagcatttccatttatatcttgtaaatggttagttttttttttttttttctcgacacagagtcttgctctgtcgcccgggctggagtacagtggagcgatctcggctcactgcaatctccatctcctaggtccaagcgattcccctacctcagcctcctgagtagctgggtctgcaggcacatgccaccacacctagctaattttttgtattttagttgagacggagttgcaccatgttggccaggatggtctcaatctcctgaccttgtgttccgcctgcctcggcctcccaaaatgctgggattacaggcgtgagccactgctcccggcctaaatggttacttttttacaatgaaaaatgaggatttcaggtagcttagaaagagagagggagaaaccaacaggacaaaaaaacatttattcagttacttttttttttttttgagatggagtcttgctctgtcgcccaggctggagtacagtgacgcagtctcagctcactgcaacctccatctctcgggttcaagcgattctcctgccacagcctcccgagtagctgggattacaggcacccgccacatgcccggctaatttttgtatttttagtagagacggggtttcgccatattggccaggctggtcttgaactcctgacctcaggtgacccacccgcctcggcctcccaaagtgctgggtttacaggcgtgagccaccgtgcccagcctaagtgccctctttgtaaagtctgtcttgttctacctttccacactacctggtattaattggaaactttaaagtacccattgattgaaaatatacccatcctggatacattttacactgtatgattatttgtaatagtgctcccaattttagtaacaattgtacaaaataaaatggactcacattccaaaatcctgaaaagaaactaagctataagaaagtaagaatttaagttatagggagtggctgggcgcagtggctcacacctgtaatctcagcactttgggaggccacggcaggcggatcacctgaagttgggagttcgagaccagcctgaccaacatggagaaaccgtctctactaaaaatacaaaattagccaggtgtggtgtctcatgcctgtaatcccagctactccaggagtctgaggcagaattgcttgaacctgggaggcagaggttgtggtgagctgagatcgtgccattgtgctccagcctgggcaacaagagcaaaactccatctctaaataaataaataaaagagagagaacagccgcatcagggtcctgagagcactacctttgggaaacgctcttcaaattttaacttttttttttttaaatgtaattttaaaaattatcaaaacaatatggttgccttttagaaatattggaaaattgagaaaagaaaattaagtcacaccagcctaccacacggtatagctacggtcatagctgtatgaatctccttttactttttctgatgcttattataactagttttaataatagcaagtatataattttgtattttatttttataatttaacatgtcagtcacttgttgttgcattgtcttcatagcatttgtttgttggtttgttttttgagatagagtcttgctctgtcgcccaggctggagtgcagtggtctgaccttggctcactgcaacctccacctcctgggttcaagggattctcctgcctcagtctcccgagtagctgggattacaggtgcctgcgaccatgctcagctaatttttgtatttttagtagagagggggtttcactatg

SEQ ID NO: 94981 - DNA, 19304 bp, Homo sapiens
ggaagcaggcaaggtgaacccattgggtggttacaaaactgccaatatgtctggcttttgagccttaccaaaggtaacctcccaggtgcacagagaaaggaaaattcaaaatgattcatggaggggaagagaatcaacaaatggtaaacatcactcagatatcaaaccaatcaggactccttccttgagcccggaattgaacctaggccactgtgtgagagatcacacagtgatcttagttactgagctacagcactgggcagtcttcattcaccttcccagaaggagtctagagtagttgattctgagcttgcaaaggcttttaactactcaataatttttagagctaactataacatgatcccccaaatttctgttcactggaaggtggagaccaagaggaagtaccatcttgtggttacaacgtcaagctctcaaggtcataaaacaagatggaggccaggcactgtggctcacgcctgtaatcccagcactttgggaggccgaggtgggtggatcacgaagccaggaatttgagaccagcctggccaacatggtgaaaccctgtctctactaaaaatacaaaaattagctgggtgtcatggcacgtgcctatgatcccagctactcgggaggctgacgcaggagaattgcttgaacctgggaagcagaggttgcagtgagccaagattgcaccactgcactccagtctgggtgacagagagagactcagtctcaaaaaaataaaaaaagaaagaaatgtcctgaactgtaccttggccccttttagccagggctggagtggctgggacacagggcaccaagtcacaaggctgcacacagcaggagggctctggacccagaccaagaaatcatttttcccttctaggcctccaggcctgtgatgggaggggctgccatgaaggtctgtgacatgccctggagacatttccccattgtcttggtgattatcattaggctccttgttacttatgcaagtctctgcagccggcttgattttctccccagaaaatagggttttcttttcttttctttcttttttttttggaggaagactttcgctcttgtcacccaggctggagtgcaatggagcaatctgggctcactgcaacctctgcctcctgggttcaagcaattctcctgcctcagcctcccaagtagctgggattacaggcatgcaccaccacgcctggctaatttttgtattattagtagagatggggtttcaccatgtttgccaggctggtctcgaactcctgaactcaggtgatccacccacctcggcctcccaaagtgctgggattataggcatgagccaccatgcccagcggggttttcttttttcttttgagatagagtcttgctctgttgcccaggctgaagtacagtggtgcaatcttgactcactgcaagctccgcctcctgggttcaagcgattcgcctgcctcagcctcccgagtagctgggattacaggcgcctgccactgtgcctgcctaatttttgtatttttagtagagatggggtttcaccatcttggccaggctgatcttaacctcctgaccttgtgacccacctgccttggcctcccaaagtgctgggattacaggcatgagccactgtgccccgccagggtttttcttttctatagcatagtcagtctgcaaattttccaaacttttatgctctgcttcctcttgaacgctttgctgcttacatatttcttctgccagttaccctaaatcatctctttcaagttcaaacttccacagatctctggggcaggggcaaaatgccaccagcctctttgcatagcaagagtgacctttacttcagttcccaacaagttccccatctccatctgagaccacctcagcctggacttcattgttcatatcactatcagcattttggtgaaagccatttaatgagcctctaggaagttccaaactttctcacatctttctgtcttctgagccctccaagtctctaggcagttctaaactttcccacgctttcctgtcttcttctgagccctctaaacggtgccaactgctgcctgttacccagttccaaagtcgcttccacatttttgggtatctttacagcagtgccccactctctgtgatactaacttactgtattagtctgttctcacactgctaataaagacctacctgagatgggataatttacgaaggaaagagatttaattgactcacagttcagcatggctgaggaggcctcaggaaacttacaatcatggcagaaggggaagcaaacatgtccttcacatggcggcaacaaaaagtgctgagcaaaagggggaaagcctttataaaaccatcagatcgcatgagaactcactcactatcaccagaacagcatgagactaaccacccccatgattcaatttcctcccaccaggtccctcccaggacatatggggattatgggaactataattcaagatgagatttgggtggggacacagccaaaccatatcaggtgtaatgctaaccctctgtgtacaggttttgtgaacgatattgattgtatgggggagactgagctcatgtcactatgccatcaatgagaattggctggtgaataccaatcctccatagccatgactgggtcgctgaataaaatgatgcagtgtgcatccaaaagctgcctcttcctctgtgggtgatctgggagtgagccaaacatgggatggacaatgtcatacctggaaagctggcagatgatgggatcctggacattgggcatgctgggggtgctcctgcatatcacccctgggtacaagaaacatcattgggccagtagcctaaaagtatgcaccatgcttattaggaacctgccaggtcgtggctgattctaggtttaggtcctctatgaaatttttggtaccatatataggagtcagtgctcatgaaaaaaatgataagaaaactgtgcctgatattgctgcttccagtgccactgccttggcagcacagggacatccttcaactcccttgggaaggttgttctattatttattttattttattttatttttgagacagaatctcgctctgttacccaggctggaatgcagtggtgcgatctcggctcaccacaacctctgcctcccgggttcaagcaattctcctgcctcagcctcccgagtagctgggactacaggcacgcaccaccatgcctggctaatttttgtatttttagtagagacggggtttcaccatgttggccagactggtctcaaactcctgacctcgtgatccacccgcctcagcctcccaaagtgctgagattacaggcatgagccaccgcgcctggccaggttgttttaaacaacagaattcctctaccctttttttttttagactaattgggaggagtgtgtgccactgccaacacctcctggtgtacctggataaacacctcaggcatggtggagacataggtagaggatctggaagcaggcctacttgttgcagtcagagtggctacctaaagaatctttcttggacctcaaaacttcttacctggatcactaggacttgggggtaggccacagctccaagcaagcctgatcatcctgcttattatagtagtctcctgggcctaatgcaatatattccggccatggcttaacaatgttgcaccgagattgtgtcagtcaagtgtcgcttttttttttttttcttttagagggagtcttgctctgtcgctcaggctggagagcagtggcgagatctcggctcactgcaatcaccacctcccgggttcaagcaattctcctgccgccgccttctgaatagctgggattacaggcgcgtgctgccacgttcagctaatttttgtatttttagtagagacagggtttcaccatgttggccaggctggtctcaaactcctgaccccaagtcatccgcccccctcggcctcccaaagtgctgggattacaggcattagccaccgtgcccgaccaaggtgccatattaatatgatcagacaaacctctgcctccagatcctgggggtctggagggcatatgaaatgtactaggtttactaaaggaggtatctgggttggggatggactgcagggcagttctctggttggccttggactgactcagttctcccctctttctcactagtagttctcaagcatagaatgtgctgggaatgtaacatcctgagagagggacggactggctggaatagccctggctctattccagcccctccctacaaacaggatgtctttcaatgctttaacccagcagtcacatgaccccagagtacaaaactcagggcagctgcagtgcaagtggggcacacacacatgagattccatcacccaggcagcattcctgagccttgggggactggtttccaatgattcttaggcttctgtcattctttgctgcctatctgtaagtaataaatccagttcatgtaaattgttgtattaaatatatgaatgtgttttctcactggactcagacaagttggtaaccagcatacagtgaacttgcttcatagagtctaatacctttttgttcagtttatacatgtttactgagctgggcatcactatatgctcttcttccttctccaccctgctatgttcccagctaggttgagctgtgtggttgggtttggccaaagagaggcattagcaagatactgaaaaacaagaggagagtcaagggacttatagtctcctccttcctgccacaaaccataggttccttctaaaaaaggtacaactcctatcagactgcccccttcccttgaaccttcagattcagggttctacaccgaatcttgtttcattgtttttgtttttaaatcttgcccatgcctttgtagatagtacctttataaaactctcctcaattacacaggctgagagtgccacttgcttactgccagaactctgtatgcatacaacccaaaatggactctgccagtgattagatttgtgaggtaagaaacaaaacaaaactttcactgggtactaacctacaggtgtgtcagtgtagtgtttttacacattagcccatttaatggtcacaataagccttttcagataagaaaactgaatttagagggttatgtttcttgctaaagatcaccaggtattaatattaaggatcagggtcagaccagaactcggctaggtctgcctccctaaacatctgctttgctccaggtaccattagccctggaaaaaaggcttggtaagggactgaggggtaaaggacggattacgaccatgtttctccaaggggtcacctgagtacaatcacctgggatgctttttcaaaatctagattcttggactgtatctctctcaatcctttagctctcagtggtttttgtgcctctatttcgacactcaccacattggattgcaggaatagtcattaactctttttttttttttttagacggagttttgcccttgttgcctaggctggagtacaatggtgcaatcttggctcaatgcaacctctgcctcctgggttcaagcaattcttctgcctcagcctcccaagtagccgggattacaggcatgcgccaccacacctggctattttgtattttcagtagagatgaggtttcactctgttggtcaggctggtcttgaactcctaacctcaggtgtgatccacccacctcggcctcccaaagttctaggatcacaggcgtgatccaccgcccccggccggattggtcattaactcttatttcagcagatactctttcatttgggacactggtgtatttgcacaaattctaggcgccccacgcagcggcctggagcctgtccccaagtccaaccaatgggagtagtgttaagggctccgccctcgactactttccagcgctcggcaaagccgccaggcccgcccactgactccgcggagctgggtcgcccctgttctacccagattgggatggcagcgacgctgatcctggagcccgcgggccgctgctgctgggacgagccgctgcgcatcgcagtgcgcggcctggccccggagcagccagtcacgctgcgcacgtccctgcgcgacgaagagggcgcgctcttccgggcccacgcgcgctaccgtgccgacgcccgcgacgagctggacctggagcgcgcgcccgcgctgggaggcagcttcgcggggctccagcccatggggctgctgtgggcgttggagcccgagaaagccttggtgcggctggtgaagcgcgacgtgcggacgcccttcgccgtggagctggaagtgctggacggccacgacaccgagcccgggcggctgctgtgcctggcgcagaacaagcgcgactttctccggccgggggtgcggcgcgagccggtgcgcgcgggcccggtgcgcgccgcgctcttcctgccgccggatgagtagtctgcccagaatttggtcgagctctgcgacccccaccggcccctttcctgtcctgggaatcgcgtgattgtggaacatccctgaacttgttccttcgctccagagtctgtcatggattctgagtctgggcgtccgctgttgcccaggctggagtgccgtggctggatcgtagctcacactgcagcctcgaactcctgggctcaagtcctctcgcctcagcctcctgagtagctactccagtctttcctttttaagtttcacgtccctccctggaggcaccaccactttagctatgtgctgaatagtgcattcaacttattatatatttattgagagccactatgtgccagccatgtggttttgtttgaatacgatatgggcaaaaccttaagctgatgtgcaagaaggatttttgcctcctttcacatcaaacttccaaagaagctaaaatccacagtattggcaatgccctttaattgtttaaaaacacacacaaaactgcctgacagtcctctcccttctatcataaacatgctgtacgtggttctcaacctgcaatgattagccgccctccctgggggaaatttggcaatatctggagacatttgtggttgtcatatctgaagggagaggtgctattggcatctagcaggcagaggccagagatgctgctaaacattccmcaatgcacaggacaaccaccagaacaaagaattatcttgctgaaaatgtctgtactactgaggttgaggaaccctagtctaagtaaacacaggatgtttgctaggtaaaggtagcccagaaagaagactcctgattaatcccttctaactaaattcctgacttaaacctctaccatataaaaatgatgagccgggcacagtggctcaggcctgtaatcccagcactttgggaggctgaggtgggcagatcacttgagcccaggagttcaagaccagcctgggcaacatggtgaaactctgtctctacaaaaaaaaaaaaaaaaaaaattaggcaggcatggtggtgcatgcctgtagtcccagctgcttgggaggctgaggtgggaggattgtttgatatcaggaagtagaggttgcagtgagctgagatcacgccactgcattccagcctggacaacagagtgaaaccctgcctcaaacaacaacaacaacaacaaattctagagttgcaacagcacatagaatccttaaaccgaattctgtgattattctccaaaacaagaaaacttgctttatttttacagctcttcagcaattcttagccttaactcgtggctgcccactgtactgtgaattcctggggctggaattgggtcttacagatttctaaatatccatgttcctagaggctttcgcaaggatatagtaggagctcaataaatcatactgactgggccaggcgcagtggctcacacctgtaatcctagcactttgggaggctgaggtgggtggatcacttgaggccaggagttcaagactagcctggccaacatggcaaaaccctacctctactaattatataatacaaaaaaattagccaggcatagtggctcacacatgtagtyccagctactagggaggctgaggtgggagaatygcttgaacccgggaggctgaggttgcagtgagccaagattgcgccactacacttcagcctgggcgacagagcgagaccctgtctcaaaaaaaaaaaaaaaaaatcacactgactaagaatcaactaaaacctttcattaaaaacaaacaaggagccgggcgcagtggctcacgcctgtaatcccagcactttgggaggccgaggcaggtggatcacctgaggtcaggagttcgagaccagcctgaccaacatggtgaaaccccgtctctactaaaaatacaaaagttagccgggcatggtggtgggtgcctgtaatctcaggaggctgaggcaggagaatctcttgaacccagggggcagaggttgcagtgagccaagatcgcaccgttgcactccagcctggaggacagagcaagactccatctcaaaaaaaaaaaacaaggcggccaggcgcggtggctcacgcctctaatcccggcactttgggaggccaaggtgggtggatcacgaggtcaggagttcaagaccagcctggccaagatggtgaaaccctgtctctactaaaaatacaaaaaattagccgggcatggtggcgggcgcctgtaatcccagctactcaggaggctgaggcaggagaattgcttgaacccggcaggtggaggttgcagtgagccaaaatcacaccacatcactccagcctgggcaacagagagagactctgtctgataaaaaaaaaaaaaaaaaaacaaaaaacaaaaaaaaccagcaacaacgaaaaaaaaaacaagactgggcgcagtggcttacgcctgtaatcccaacacttcgggaggccaaggtgggcggatcatctgaggtcaggagtttgagaccagcctcaccaacatggtgaaaccccatctctactaaaaatacaaaattagccaggtgtggtggcacatgcctgtaataccaactactcgggaggctgaggcaggagaatcgcttgaacccggggggagacggaggttgcagtgagccgagatcgcaccattgcactgcagcctgggcaacaagagtgaaaccttgtctcaacaaacaaacaaacaaacaaacaaacaaacaggctgagtgcagtggctcgcacttaaaatcccagcacttgaagaggccgaggtgggagcattgcagtgggaggattgcttgaggccaggagtttgagactagcccaggcagcatagtgagaccctatttctataaaaagttaaaaattagccaagcataggggcctagctacttgggagggtggcttcttgaggctggagggtcacttgagcccaaggattcaaggttacagtgatctacaggctacagtgcagtggtgtgatcacaggtcaccacaaactggaactcttgggctcagatgatcctcccgcctcttcctcctgagtagctaagactataggcaagtgccatcatgcccagctagttttttaaacttttttgtagagacgggtcttgttatgttgcccaggctggtcgtgaattcctggcctcaagtggtcctcttatcttgacctcccaaagcactgggattataggcatgaaccaccacgcctggcctcattatgttatttctaacttggtttatttttgtttgtgaaaataatattattattattattatttttgagatagagtctcactctgtcacccaggctggagtgcagtggtgtgacaataatttatatcattaaaaagttttaggccggttgcggtggctcacacctgtaatcgcagcactttgggaggccaaggtgggcagatcacctgaggtcaggagttcaagaccagcctggccaacatggcaaaacccagtctctactaaaaatacaaaaaaaattagccgggtgtctgttgcatgtctgtaattccagatacttggggggctgaggcaggagaattgcttgaacccagggggcagaggttgcagtgagctgagattgcaccactgcacttcagcctgggcgacagagtgagactgtcaaaaaaaaattttttttttaatttcaataccttttggtgtacaggtggtttggggttacacagatgaactgtacagtgatgaacgctgagattttagtgcacctgtcgcctgagtagtatacattgtacccaatatgtagttttttatccctctatattatcattattgtttgagaaaataagacattttgttctttctctgccaatctctctacccccaatctccttggcttcaaaaacttgtttgcttactgtcttttgagaaactaaagctccctgtgatttgtgatgttctccaggcagggggccctttcctgggatcattgatctgtttgggagcagcaggggcctttgtgaatacagggccagcctcctggccggacatggttttgctgtgcttgccctggcttatttcagatttgaagacctccycgaagatctgaatgatgtayatctggagtactttgaagaagycgtggactttatgctgcagcatccaaaggtgyrttctggtgatcacctgagtgcagaagagaggggatagagctgatgcagggctgaatccaaaagccctgccagaacactgagaactagaaacatgccaggagataccaagtctccttcaaaggttactagggtggaagctgggcatggtgatgtgcacctgtagtcccagctacctgggaggctgaggccgggggattgcttgaccccaggagttcaagaccagcctgggcaacatttagtgagacccctgtctcaaaaaaagtttttgtactaggattattatttccattttctcccatctctctctaatccctgaagacttgactatttagttgtctttgtaattgtggaccaaaattcaaagagcacaggactaaaaaaagttccagctctgcatctaccacagagtggccttatgattctgaataaggcagttactctctctggagttcaattttcctccttaataagattaatgtaaatgtatatagagaaaatgactataaagagatattttttgagacaactggagacatttgaatgagaatggtgtatttgattatatgaagtaatcattaattttgttgggtatgataatggtattatggttttgtaaagaaagtccttatctgataacagaaataattaattaattaaaacattttggccaggtgcggtggctcacgtctgtaatcccagtactttgggaggccaaggcggcagatcacctgaggtcaggagtttgagaccagcctggccaacatggtgaaaccccatctctactaaagatacaaaaattagctgggcatggtggtgcacacctgtaatcccagctactcgggaggctgaggcaggagaattgctcgaactcaggaggcagaggttgcagtgagtcgagattacaccattgcactctagactgggcaacaagartgaaaccccatctcaaaaaaaaacccaacaacaacaacgacaacaaattttggtataattaaaaatggaattatatatactctttgttatcatccaggtttaaagagatccagacattctaatgttaagatataagatgttctgcagggttctctcccccacaacccctagtgctcttgggatccggcaccccagaattctctgccaaacagctctgatcctgcttccaggccctaagcctcttttctgggttcgtcagtgtatatatacctaggccttaaacatgcaagctggggtgtccacacatatgtgtgagaggccccttaaggtccacgaaggagccagtgatggaagagaaggagtgtggtgcagggcccacgggctgacctctcccctatgtcactttccagtacagaactccagtggattccaagattttaaatttgagcctgaacttatgaattgttatggtggtatatttatcaaggcaggagaatatactgtatttaacagtttgttcatttgatttataattttgaaatatttaggtatagggtgtctgggcctctgtgtatactcctgacccagtcctcataaatattaggggatgacccattactaggaaatcagttgatttgcttattagaagacatatttgaactttgcagattgttggatacggaaggaaagcaaatgatagttaagaaagctactggyggggcacggtggctcatgcctataatcccagcrctttgggaggccaaggcaggcggatcacttgaggtcagaagtttgagaccagctggccaacatggtgaaaccctgtctctactaaaaatacaaaaattagccgggcgtggtggtgggcrcctgtaatcccagctactcgggaggctgaggcacgagaattgcttgaacccgggaggtggaggttacagtgagccaagwttgcaccrctgcactccagcctgggtgacagagcgagactccatctcaaaaaagaaaaaaaagagaaagctacytggagaatgtaaaatcactgtctgtgtcctccatttatgaattctaagcttgttttccttctctttttcctcaacaggtgaaaggtcctagtattgcgcttcttggattttccaaaggaggtgacctgtgtctctcaatggcttctttcttgaagggcatcacagccactgtacttatcaatgcctgtgtagccaacacagtagctcctctacrttacaaggatatgattattcctaaacttgtcgatgatctaggaaaagtaaaaatcactaagtcaggatttctcacttttatggacacttggagcaatccactggaggaacacaatcaccaaagtcttgttccattggaaaaggcgcaggtgcccttcttgtttattgttggcatggatgatcaaagctggaagagtgaattctatgctcagatagcctctgaaaggctacaagctcatgggaaagaaagaccccagataatctgttacccagaaactggtcactgtattgacccaccttattttcctccttctagagcttctgtgcacgctgttttgggtraggcaatattctatggaggtgagccaaaggctcactcaaaggcacaggtagatgcctggcagcaaattcaaactttcttccataaacatctcaatggtaaaaaatctgtcaagcacagcaaaatataacattgtagccacagaccagataccattaataaaaatcctattcatacaacttgtgttgggttttctttctttcttttctcttttttttttttttttcctgtatcactctgtcacataggctggagtgcagtggcataatcttggctcactgtaacctctgcctcccaggtccaagctgttctccgacctcagcctcccgagtatctgggattacaggtgcacaccacggcacccagctaatttttgtatttttagtagagacaaggtttcgccatgttggccaggctggtcttgaactcctgcctcaggtgatatgcctacctcactcagcctcccaaagtgctgggaatacaggtgtgagcaaccacacccagcctgtgttgggtttcccagagcccgtagcaacctttttagtgacaaagcaaccagctcagcttttttgtcaggtcctccctgattctcaacctttgcaacctgccttccgtcactgctaggtccacgtaggcttaaccttgatcttatatgtaggaccggtcttcaccttaagcaagagaaatgtaagaagtgctttcccaactcagttgctggcccagctttggcctcgtgttccctttctgaggactgacctttggtattgctctggagtctcatatcccctttggccctaactgaccacgtctgagtcttgggaacctgcccactcgattgccttaaggaatggactctgcctcattctttttttttttgagacggagtctcgcttttgttgcccaggctgaagtgcaatggtacgagctcagctcactgcaacctccgcctcccaggttcaagcgattctcctgccccagccttccgagtatctgggactacaggctcgcgccaccatgcccagctaatttgtgtatttttagtagagacagggtttcaccatgttggccaggctagtctcaaactcctgatgtcaggtgatccacccacctcagcctcccaaagtgctgggattacaggcctgagccaccacgcctggctctacctcattcttgcccatacacattgctgaacatttactcaagacttctccctgggccgggcacggtggctcacgcctgtagtcccagcacttgggaggctaaggcgtgtggatcacctgaggtcaggagtttgagaccagcctggccaacatgatgaaatgatgaaacctagtgtctactaaaaatacaaaaaattagccaggcaaggtggcgggcacctgtaatcccagctacttgggaggctgaggcaggagaattgcttgaactcaggaggtggaggttgcagtgagccgagatcgcgccactgccctccagcctgggcaacaagagcaaaactctgtctcagaaaacacttgtctctgaacccgtctgaagaccaggagcattatacctgtggatatacttcttttacgtttgccaggggattcccagtcactatatggtcattgcctgcctggaggaatgccttgatgccaagattttcaggacaataccttgcacgccatggccttcatctttgatgtcatgttatacctaccaaatcggacttcctcccacaaccatctagtccaattaccctcctactgagaaggactgggacctgtctgcctcaacctactgcagtatactgggcactatctagagtcataacagaccacagcagagagtcttccttgagcataagaaagtttttctgtgatttcacggcacatcccatgattttctgagtacgtacaaaatccttcaccaatttcaatctatccaagcaagtgcccattagatcttaacaatgaaaagttccttagaggtaacttaattttgatcagttgttaaactctgtgttgagtatagtcattcaccttgtagtataattttcctttctttctttcttttttttttttttttttttttgagacagtctcactctgtcatcctggctggagtatagtggcatgatcatggcttactgcagcctcaacctcctgggctcaagtgatcttctcacctcaacttcccaagtgactgggactacaggcatgcaccaccaaacctggctaactttttattttttgtagagatgaggtctcattacgttgcccgggctggtctccaactcctgggctcaagcgaactgcccccctaggcctcccaaagtgctgggattacaggcgtgaatcactgcgcctggcctgtgtagtataattttctatgatgtgaattctgggagcctatgctttaactcactcccaagtggacctgctactgtggagatgctcttggggtgggagatcacaggaggaagatatgaggaaagtggcagggaggatgagaaagcaaaggccaaaaaggtagtcccagaagtcatgcaggagaatgatgactccacatctatatgtattgaagaactagggcaagacagccctagacctcgatttcttccttacagataaagcaacctagaaatggcatacactgactgaagatatttgcttgcttttccctgagaggtgactgtatgtggccacctgtctccaatatatatattttgacacagagtttcgctcttgttgcccagcctggagttcagtggtgcgatctcggctcaccgcaacctctgcctcctgggttcaagtgattctcctgcctcagcttccctagtagctgagattataggcgcaccaccacacccggctaattttgtacttttagtagagaaagggtttctccatgttggtcaggctggtctcgaactcctgacctcaggtgatcgcctgccttggtctcccaaagtgctgggattacagccatgagccaccgcgcctggcttgagatttttatttcaaaaagaatctcaggttgttatcaagccatttgaaatgcagtaaagcaatatgaagcagaagggagaaagagaaaagttatccataaagttaagccagaaatgaggctaatataatagtgcttattatggaatcctatgcccttgcctggattgaccactcattcagtcatgtattttatagtggtttttttgtttagtttttgtttttttttgagacagagttttgctcttgctgcctgggctggagtgcaatggtgcaacttcggctcactgcaacatccgcctcccgggttcaagcgattctcctgcctcagcctccctgtagctgggaatacaggcatgcaccaccatgcccggctaattttgtattttttttagtagagatggggcttcaccatgttggtcaggctgatcttgaactcctgagttcaggtgatccgcccacctcagcctcccaaagtgctgggattacaggcatgagccaccacgcctggccttatagtggtttacgcaaagaaggagacctaattagttacacaaaatttacaactttcataaaataaaagccaaacttagaaatcagtttcttccaaagatagtcatactaagaaacattacgtgatataaagggtagtgttatagtttagatgttgtcctctccaaatcccatgttgaaacttgatccccaggtgggcatggtggctcatgcctgtaagcccaacactttgagaggcccaggtaggaggattgctcaaggccaggagtttgagaccagcttgagcaaagtagcaagaccctgtttctactaaaaatgtttttaaaattaaccaggtatggtaatgagcacctgtagtcccagctacttgggaggctgaagcaggaggattggttgagcccaggaattctcgctatgatgatggcactgcattccagcctaggtgacagagcaagatcctgtctctaaaaaataaagagaaatttgcatcccaatgttggaggtggggcctaatgggtggtgtttgggtcatgagggccaacccctcaggaatgtcttggtgcagtcctctctgtgagttcccacaagagttcccctgagagctggttgtgaaaaagagcctggcacttccttcccctctttcctgcttctctctcgccatgtgatctgcacacgctaggcctctgtcccttctgcagtgagtggaagcagtctcaggccctcaccacaagcagatgctggcactgtgcttcttgtacagcctgcagaaccgtgagccaaataaacctctttttggccagggccagtggctcatgcctgtaatcccaacattttgggagcctgaggtgggaggattgcttgggacctggagtttaagaccagcctagacaacatagtgaaaccctgtttctacaaatatatatattttttgatacggcatcttgctctgttgcccaggctggagtgcagtggtgcaatctcggctcactgcaacctccacctcccagattcaagtgattctcctacctcagcatcccgagtagctgagattacaggcacacaccaccacacccagctaatctttttgtattttttttaagtagggatggggtttcgccatgttgcccaggctggtctcaaactcctaacctcaggtgatccacctgcctcgggcttccaaattgctgggattacaggcatgagccaacgcgccccgcccaaaaaaatttttttaaataaaaattagccgggtgcagtggtacccacttgtagtcccatctactcaggatgctgaggtgggaggataactttagtgtaggaggacaaggctacagtgaaccatgatcacaccactgcactccatccagcctgggtgacagagaaagactgctcccctctaccccaacaaaaaaaaacctctttttagtaactcttctttatagcaacacaaatgcactaagacaggtaatattttcaaggatgcttctacagcagacgtaaatcccagcctaatccaggctcacacagtttagtaagtagtgcagcctggggtttctgtctatatgcctcatctatgaaatgggcgtaataatagtaactacttcatggggctattgtgattaaattagataatctgtgtaaagtacttaacatattttaattttcaaatacaggtatactttgttttattgggctttgctttattaaattttccacaagttaaaggtctgtgacaaccctgtgtcaagagagtctatcagcaccattttcaacagcatgtgctcactttgtgtctctgtgtcacatctggtaattcttacaatattacggtcttttcattattttatttatttatttatttatttatgagatggagtcttgctctgttgccaggctggagtgcagtggtgtgatctcggctcactgcaacctccgcctcctggattcaagcgattctcctgcctcagcctcctgaatggctgggacttacaggtgtgcaccaccgcacccagctaatttttgtatttttagtagagacggagtttcaccatgttggccagggtggtctcgatctcttgacctcatgatccacccgccttggcctctcaaagtgctgggattacaggtgtgagccaccgcgcccagcctattttatttattttattttttagacagagtttcactcttgttgcccaggctggagtgcagtggcacgatctcgactcacagcaacctccgcctcccaggttcaagcaattctactgcctcagcctcccaagtagctgggattacaggtgcatgccaccatgctcagctaatttttgtatttttagtagagacgaggtttcaccatttgaccaggctggtctcgaactcctgaccttaggtgatccaccagcctcggcctcccaaagtgctgggattacaggcgtgagccaccacatctagcctttttcattattattatatctgttacggtgatctttgatgttactactgtaattgttttggggctcccagaactgcacccacataagatggtgaacttaataaatgttgtgtgtgttctgactgctccaccaactggcctttcccatctgtttccctctcctcaggcctccctattccctgagacaaaacaatattggaattatgccagttaataaccctacaatggcct

SEQ ID NO: 94982 - DNA, 39025 bp, Homo sapiens
  misc_feature (1)...(39025): n = A,T,C or G
tgtggtagcaggcgcctgtaatcccagctactcaggaggctgagggaggagaattgcttaaacccgggaggcagaggttacagtgagccaagattgcaccactgtactccagcccaggcaacagaatgagacgccatctcaaaaaaacaaacaaacaaacaaacaaaaaacaccagggcaggtggggtgcctcatgcctataatcccagcactttgggaggccaagatgggtggatcacttgaggtccggagttcaagaccagcctggccaacatagtgaaaccctgtctctactaaaaatacaaaaattggtcaggcatgggggaacacacctgtaatcctagttactggggaggatgaggcaggagaatcgtttgaacctgggaggtggaggttgcagtgagccaagatcacaccactgcactccagcctgggcaacaaagcaagactccatctcaaaaaaaaaaaaaaaaaagagtgcactgttatacatgcccacttgggctttgggagtcacaggcacccacccctagatgctaccgtggggctggagcccaaaagtgctcgccctgactcctacacctgcccatctgcgtgctccctctcccataagaggattgagtgcacacagacaagccacacccctgtcgtatgtcctgcggttagggaactcccctatttcaacatgaggacttttatcttcatctgtatgccaatgactccatatttatatttccattcccaacctttctaaagaactacaaaggtttatgtccaagtggttatttgaatccctctctatttacatataaaaaaactgcttaaggccagatgcagtggtgcacgcctgtaatcccagcagttttgggaggccgaggtgggtggattgcttgagctcacgagtttgagaccagcctggccaacatagtgaaaacccatctctacaaaaagcaaaaaaattagccaggtgtggtggtgtcagcctgtagtcccagctacttgggaggctgaggtggaaggatggcttgagcccagaggtggcagctgcagttagctaaggtcacaccactgcactccagcctgggtgatagagccacatcctgtctcaaaaaaaaaaaaaaaatccccacttaaactttaaacctaattatcttcaaaaccatattcccccaatcttctcccatctcaagaaataacactaccataaattccaattctcagatcaaaaacccagatgtcatccttcatgcattcttttccttcacccttccataaccaatccatgagtaaatctagtcgtttctaccttcagaatacaccctgaaatcaaataacccaaggaaccatcacttctttcttggactacttcaacagcctcttaacagatctctctgctcccattcttaccctttccccttcacacccccggaatctattctccataaagaggccagaattgatttttttaaacgtcaatcagttcgtgtctctctccagcttaaagttcctcccagctaaatctgtgaatgtgtatctaccacactctataaaatcttactcagcctctacctaattctttgacatcatttctcttccactcttcccttgcacacagtagtactcaatattaacatttgttgagtttttattgtatgctcagtatgctaaccagttgcataactagttcatttaatgctataaacagcagttcttaacattttctgggtaaccacatctctggaaatctgggaaataaaatgaactcactccccagaaaatatacatacgtacaaaatgtacttttctctaaactgaatttgttttgccaaatattccaaaggaatttccaatggcattttaattgtaaagaactcaactaatacattgccttaattaaagcatccaaaaattagcttctctttgttaccgatttctgaggaatgttcaaccataacaaaagtaaagttattgggccaggtacagtggctcatgtctggaatcccagtgctttgggaagccgaggcaggaagattgcttgagcccaggagtttgagaccatcctgggcaacatagtgagactccatctctacaaaaaataataaggtgggggcatggtggctcacgcctgtaatcctagcactttgggaggccgaggtgagtgcatcacctgaggtcaggagttcaagactagcctgggcaacatggtgaaaccccgtctctactcaaaatacaaaaattagccaggtgtggtggcgtgtgcctgttatcccagctactggagaggctgatgcatgagaattacttgaacccaggaggcggaggttgcagtgacccgagatcatgccacagcactccagcctgggtgacagagtgagactccgtctcaaaacaaaataaataataataataataaattagctgggcatggtggtgtgagcctatagtaccagctacttaggaggctgagatgggagaatcgcttgagcctttgagggtgcagtgagctataatcatatcactgcatttcagcatgggcaatagagtgagagagaccctgtctctaaaagaaagttaaaaaaaaattattgggggtacaatctaataacctacatgggtgaccttatgataccacagtctgggatagaactcagactctgctgtgagtcttactctcataaattaagtaattagatggctgtatttgaatttcagttttctccttttcaaagacgctccagcaaatttatcacgaaaaagacaaaagagtaaatgacaaacatattaaaataaatattatctgaattaaattttaaagacagtgacaggtggaacactaaaaatagaagtgaaagagctaggccgtggaatattttggaatgagatacttatttagaagctgaatttaagttcaaagtgcttgacttgattttttcagattaaaaagaaaacattaggtggagaggagtgaaactttgtaagagatgagaatgaaaacttaaaaatcaagagtgcaaataaagtgaccatagagatggctagaaaaggaaaaaaatttaatttttttttttttttttttttttgcaatggagtctcgctctgtcccaggctggagtgcagtggcgtgatctcggctcactgcaagctctgcctcccgggttcacgccattctcctgcctcagcctcctgagtagctgggactacaggcacccaccaccacgcctggctaattttttgtattttttagtagagacagggtttcactgtgttagccaggatggtctcgatctcctgacctcgtgatccacccatctcgccctcccaaagtgctgggattacaggcgtgagccaccacgccaagccaaatttaatgtttttaatactcttcctggccaaagaaaggaaactaaattgagagatgacaggggaaaaaaatcaaactcaaggaacacatctctaaaatccccaaagtttgtaaaaacaatgtaaaaataaactaaaaagtttaataacaattacttctacttgtattacttggctttttttttcaactgtggtgaaatatacataaattttaccattttaataacttttaagtatacatttcagtggtattaagtacattaattgtgcaatcatcacattcatttccagaattctttcaccttcccaaactgaaatttggtacccattaacaataactccctattcccttgcctgactttttaaatgcccttctttctggcaagagaaggacatttttgcaagagcgcacccaggcaggagaatctcttttgactccaaacatccataatttctttttttttccttcttttttttctgagacggggtctcgctttgtcacacagactggagtgcagtggcatgaacatggttcactgccgcctccaccccctgggctcaagagattctcttgcctcagcccccccaagtagctgggactacaggtttgtggcatcacacccagataatttttgtatttttttgtagagatggggtttcaccatgttgtctaggctggtcttcaattcctgagctcaggcgatctgcctgcctcagcctcccaaagtgctgggattagaagtgtgaaccaccacgcccagccataatttctaatacagtatgtacctgcgctcacaaaatttaagactcggttaaacttaaaacttaagatcaagtaatatattatttctgcatatatctaatcaatctttcaataaatgttaattaaagacctactgttcgtcaggcactgtgctaaacctggatccaactatgaacaagacaaacttggaatttacaatctagcgcaaaaggggcaaagttaacagagtaactatgctgacaaggaagatactgagataatgaataatggtgggaaagggcaactccagatactgtgttctaagaaagactctttgggaggtgacatctaaaaagagaactgaaactgaaaaaaaaaaatgtttatatgtttgagtcatcttttggtctcccaaagcacctagcattatgcctttcatgtagcaggtacttaatatagctcaccttggcttcaatttcttcattcctgcaatgaacttccaagattccttccaaatataaaatgtttttgtctaagggaaggaaacctatatatcaataaaatcgatatatagttgggatgaggatggtagaactaaaaatgagtttaaaaatgactgcaagaccctaactctctaaagcagaaccaagaggaaaagcatgggagtataccaaaacaacttaattgttacttgaaatgacttgcattttacacaatatataaacagaaatcgttaattcactcagccttaagaaacaacacgtaaagcagatggaagacaggttgcgacctgtgcaagacgacacttaaaagctcaatactgattctcctcgcgactctcagggcgaggggccgagaacgtcccccgcttctcttgctgccacggcaatggtcccaaactgaggagacaggagagagatcatgtttctcttgcggttcagtatcgagatgaggtcagccagcagccctgcgagggtttgtgagaatcattccatccgtgcgctcaatcagaagagaactgatcctttcaatgggtaccccaaggagaaaactacagtaagccacgtcctccagaaacatctcctcctcgaccctcagcctcgcccaaatagagataargaaggcacagggcgacccccctgtccttttacccagaatgagtccctccctagtgccctcctccacacgcctggtacagagcggggaaactgggcacctccggagctgctgtgaagaaccggtgagctgaagacggcgatggatctcaagaaaaaaaataaaagggaaaggagaagagcccaagaaagaaatgtatgttcgaggggcagagacagagtggatgttcccagtagagcaaagaaggaggctgcaggmaaagatctctaagccggctcttaccgtctgtgggagacgccatcttccaacccatgtcacgtgacgtggccaaccgtcggcgggaaaacgaggttccataagccacgcccccaaagagaaaccctatccccaactcgcagcccagtctcattccctcgcctcatagggcaatctttgcctagccccgcccctaagtatagccacgccccttacgcggatgttgaggtggagcgactgcaaaattcttgaagggtcttatttacttttttcagtgggggggtggggcctcggttccgcccttggccaatcggagttccaggttaggggggcgtcttccccgtgtgctcggtagggagtgtccaagtcaggggcgtcttctctacctccgcctacgtcattggctgaggtggcagagggcgagagcattttcgctcctaaccaatcacttatccccaggacgggggtgtgaggrgaggaatcaggtgttcggaccagtgattggctggagaaaatagtcctccccaccaatgaggaagcctggcaggatggagggcgaggcctggcagctgtagtgcttctgggcagtagaggcgcggggtgcggagctagggcggccgagagccatggcggcgctattggcggcggcggcagtgcgagcccggatcctgcaggcgagtgagggtggtgccaaggcaccatgaagctaggaattggatcctttccgtcckctccctgagccatcctcgggcgggaccaccttcttggcccaacccctttttggccagacctcctacccgacctgtgcggccctgwcccatgcccagccctcacttcataacctccctggtcccggatccaaccctgggctgttacccttggccctctacccttttactcctaagcctcctcttttctggctctcgcccactctccttctccagctctgcccgctccctgctgtcactctcttgccctcatctctccatccgcccaccgtctttcctttttacctctgcaccagccttctctctctcccccagaaactactctttttggttactctgtcccctgccgtgagcgtccactttgccattgctcccttcccccaccctacttcactatccgtggtgatctgaggtaagggggaggggggacgcgaggggcgagggtcagtgtatgaactttgaatttccttctagaggtggactctagattttcaccaaaggcagccatttgctaagctattttccctaagtgtggctctttgtattttccatggactggctgtcccctttcttgccaaaactttgagttaaactttttctcagctaagttacagtttacatagatagggcacatctacatagatagggtagataagggcacacagttaaagctaccagtatgttccatgtatgttcaaggtaccaaacatctttaaaacgggtgatagaaagtgggagccaggtaagacaagaagtctaagttcccaccccaaaatcagctcttctagtgctacacaccctcatctctgcacttgggggattgagtcctctctgaagccaacctaaggagaaatggtaaagctacaggagttgcatgcctgaggcctgtaatctccaactctgtttatagtctttcccctgttcatggcctaccaaggatttagagtatgtggcaagatttaccgcaggcaagaaacagtctgcaagaaacaacagtgccgttcttattcattacatccagtctgagaatttcctctatattgctgagcttttaggtaatattagtattcaccaggtttccgtgagttctagtaaagaaacttgggcagttttaagattcttggcagagtcagcaaagattcatttttaaatatgctatttaatggggaaggtagaaaggatgagtttgaagggtttggcagatggtctggcctcactcatatttcttgctgcgatccttgttctgttctagtatctttttttagtagcaggaaaacaaagtttccaccctatatttttcttaccaacttcttgaaatcttttactgaaattggcttttttcctttgcctcctcttcccctcccatcacaatgagtcattgagaaccttaagaaagtattttgtccttttccatcaaggagaagaatctctctttccatgtacttttatttcagaaacagacactatgtattttctgattcatttggagaaacttctgaagtgacctggaaaagaacagatagagtaatcctcagccaactaggagttgtaacgtgaatctttgattaaaagttcgataaaaagtagcctacgggccaggcgctgtagctcctgcctgtaatccctgcactttgggaggccaaggtgggtggatcacctgaggtcaggagttcgagaccagcctgaccaacatggtaaaaccccttctctactaaaaatacaaaaattagccgggtgtggtggcgggcgactgtaatcccagctactcaggaagttgaggcaggagaatcgcttgaacccggaagacggaggttgcagtgagctgagatcgtgccattgcactccagcctgggcgacagagcaagactccatcaaaaaaaaaaaaaaaaaaaaaaaaaacctcgattttggcagccatgaatattagagaactatcaaaaggatttatagaggagaaagttaatgttttcaattattttaagtattcagcttatttttctctgccacgaagagtagtcaaacttaacctaaaacctctctctgctccttgtgatattatcactcccatgcagagataaaggaatgttcgagacagggtctcgctctgtcacscaggctggagtgcagtggtgcaatcacaactcacagcagcctcgacctcccacgctgaagtgattcttccatctcagccctccgagtagctgcaacaacagatcgtgcccccatgccagctaatttttgtattttttgtagagacagggtttcaccatgttgcccaggctggtcttgaactcttaaactcaagctatcctcccacctcagcctcccaaagtgttgggactacaggcacgaaccgctgcacctgggcaagaaaattactcttgaagagatgtagcgacttgcactgtcggtgatatggttaccgaactagtaactgatggggctgaaaattcagaacttaagtcttgccatctctttctatgttaggcactgacataggcttacagtaaaatgctcactgaaagctcctttattgtactgcaataagtgataaacaataggagtatctgggatactgtggggacctagggaaagagccaagtattgcaggactagcaggccatgaaccaggagaggaaggagttcctkataaaggatatagcaagtaggaagtaaacatctagagagcagcagtttggggtgactggccacaggatagtttcttcagcaacaatgctaatgggtgtttcttaggaaatgaagaaaagatagaagatcgaacctgtcaaaaaactatatgaatatgttctattataccagatgtagtgctttttacatcctcttaacagcagggaggctgtatacaagtgaaaaaataaaatttaagtggcctagaatgctcaagttggctgatcagtgcattgtctgccaacttgagagtactgaaacaatatcaaatgattgcttggcgagtactcattctttcattgtgcaaaatattgcttactaagtacttactctcttccaggaattgtgctaggggctggggacacaacaatctagtgacctcaaaggagagaaagttaatcattagacaagctattatttcatagcgtgagatgagaaataaaggaatttgggtgctttatgagcttcacaatcagctgcttaccatagacctgaggttgagacttcctagagaaagtgatgatggctgagtggggacctaaaggagtaggaatgagccaaggaaattagatgaaacagtgccaggcaagagagagcagcatgtgcaagagcaaagaaagcaagacacacgttaaattgcaggagcatagagaacagggaggaaagtagccagttatgtaactagaaaagcaaagatactatgtagcgttttctaagcaacatcaaggggattagtctttattccaagggcagtggaaagccaaagaagaattttaaacaagggaataatctgaccagatttatgtttcagaaagaccctctgattatgggatggaaactagattcagaaagtttaagagtaggctgggtgtgatggctcatgcctgtaatcccaacactttgggtggcccaggcaggaggatcgcttgaggctaagagttcaaaaccagccctggcaagatagggaggccccatctctacaaaaaaaaattttttttaattagctgggcatggtggcatgtgcctgtactcctaggtacttgggagactgaggcaagaggatcacttgagcctgagagcgaggtcgtgtgcacctgtggtcccaggtacttgggaggctaaggcaggaggatcacctaagccctggagattgaggctacagtgagctgtggttgtgccactgcactctagcctgggtgacagagtgagactctgtctcaaaaaaaaaaaaaaaaagaaagagtttaacattagaggctgagagatgtgttaggaagctattatggaaggtcaagtgagagacaatgatggtatagactgggataatggcaggacagctagaggtgagtgatgtgtttcaaacaattctaggacagactgccaggagttttttgcttccctgcagagagagagggaggaattggaatagtatctgggtttctcctttggcaacttgttaaggagtagccctatttaccgagaggtgggctataggaggcatagcaaactggcaaaaggaagatgcagagtttagcttttgcttttgttttttggtttttgtttttttaagatagggtctcgctctgtcacccaggctggagtgcagtggcacaatcgcagctcactgtagcctcaatctccaaggcttaggtgatcctcctgccttagcctcccaagtacctgggaccacaggtgcacatgaccatgcccaactaatttttaaaattatccgtagaggtcacatgtcgtggctcacacctgtcatcccagaactttgggaggccaaggtgggcagatcatttgaggccaggagttcaagaccagcctggccaacatgacaaaaccgcatctccactaaaaatacaaaaaattaggccaggcgcagtggctcacgcctgtaatcccagcactttgggaggctgaggcgggcggatcatgaggtcaggasatcgagaccatcctggctaacatggtgaaaccccatctctactaaaaatacaaaaaactagccaggcatggtggcgggcgcctgtagtcccagttactcaagaggctgaggcaggagaaggtgtgaacccaggaggcggagcttgcggtgagccaagatcgcgcaactgcactccagcctgggcgacagagtgagactctgtctcaaaaaaagaaaaaaaaaaaaaacaataagaaaaaaaaattagccgggtgtggtggcatatgcctgtaatcccagctactcaggaggctgaggcaggagaatcgcctgaacccgggaggtggaggttgcagtgagccgagattgcgccattgtactccattgagtgcaggcaggtctcaaattcctgaacgcaagtgatcttcccacctcagcctcccaaagtgctgggattacaggcgtgagctactgtgcccagccacctttttttaacatgtgcccaagtaacatccaaatagagatgtggtaaagataattacgtgggtatcacctgaagaggaaaatactggccaaggactaaagagttgggcatcatcaggatctagatagttaagccatgagagttgataaaatcacccaaggagcatatacagaatgagaagaaaagaaggcctaggaccaagccttgggaaacttaaagagttaatggcagcctggtggggtggctcacccctgtaatcccagcactttgggaggccaagatggtcagatcacctgaggtcaggagttcgagaccaacctggccaacaaggtgaaacactgtctctactaaaaatacaaaaatgtggccaggtgcagtggctcacacctgtaatcccagcactttgggaggctgaggcaggcagatcacttgaggtcaggagtttgagaccagcctggccaacatgttgaaaccccatctctactaaaaatacaaaaaattagctggatgtggtggcacatgcctgtaatcccagctactcagaaagctgaggcaggagaatcacttgaacccgggaggtggaggttgcagtgagccaagattgcaccactgcactccagcctgggtgacagagtgagactctgtctcaaaaaaataaaataataaaagcaaattagctgggtgtggtggtatgtgcctgtggtctcagctatttgggaggctgaggcaggaagatggcttgagcccaggagatggaggctgcagtgagctatgatcatgccactgcattccagcctaggagacaggacgagaccctatctcaaaaaaaaaaagtatatacctcttcatccagtccacatatattgatcgtgcaccactgtctcggtcacttttcctgcatggagcttgctggctaccttctccattaggttgagttcagttttgtaggtttgctagtaggaagttgagaagttctcatctgatggtttctgtgtgctctgaagtaagaaaaacaaagtcagctcctgaaagtacaagaggaattagtagaattgggagttttaagataaagttgtggaatagcaaagagtgaaaataaayaataagtgtttattatttatagaaatggagtctcgttatgttccccaagctggtcttgaactgggctcaagagatcctcctgcctcagcttcccgagtagttgggactacaggcagaaatcaccgtgccgttatttacaatgacataacaataagatttaatgagtaccagctttgtgctaactacttttctataactggacagtcctgatcagstttaatctttaactctgaagtaggtgaacaagacagatgcagtgtcaaccctcctgaaactgacagtctttatgggtaacagataagtacccaggtgctgtggcttggatatggttggtttgtctccaccaaaactcatgttgaaatttaatctccaatgtgatagtgttgggacctagtgggaggtgtttgggtcatgggggtggatccctcatgaatggctttgtgctgtagtgagtgaattcttgctcttttgagactggattagttcccatgggaatggattagttcctgtgtgagtgggctataaagccaggatacccccccagttttgcctcttcacacaggtctgcttcccctttgatcttctctgttatattatgacacaggacagaagccctcgccagaagctagagccattcccttgaacttcccagcctgcagaatcatgaactaaataaactacttttccttataaattgcccagtctcaggtattttgttatagcaacacaaaacggaataagataccaaacaattacaacacagagagataagcctgaaacgggaagtattggctgctttcagaggacaaaaaagggcctcttaacctagtttggggtaggaagcagacaggaatgggcttctattttattcagcagatatttactgaacacctactacctaccgagtactatrttggtattgggaacatagctataaataagacatgatgggctccaggagagtgtcagtggtttgaaatggctttggtagggaatagaagagcaaacagatgaggtatttggaaggactatctgctggaccaaaggaccaccaccttttcctgggcagtgctgcaggcacccttcatgcagctctatactctggttaacagagtcccttttcaggcaagataaaagattattagattgcagctttcctttatatcccagtcctgagtattttagtttgctcattttgattggcttaagtatttcttaaatcaactttgataacatatatataggctgggtgcagtggcttacacctgtaatcccagcactctgggaggctgaggcgggtggatcacctgaggtcaggagtttgagaccagccaggccaacatggtgaaaccccatctctactaaaaatacaaaaaaaataaaataaaattagccaggcatggtggcgggtgtctgtaatctcagctactcaggaggctgaggcaggagaaaagcttgaacccaggaggtggaggttgcagtgagccaaggtcatgccactgtactccagcctggtcaatgagagcaaaattctgtctcaaaaaataaataaataaaaagaaaattagctgggcgtggtggcagacacctataatctgagctacttggcaggctgaggcaggagaatcgcttgaacacgggaggcagaggttgcagtgagccgagatcatgccactgcactccagcctgggcgacagagtgagactccatctcaaaaaatcaactttgataacatatatacagacttttttagtgagttacaatttgagagttatcttgttgaaactgatcctccccgtttactgattttactccatcaaatattatctatccaacacattttttcctttaatgtacctatggcatttcaatatagctttattaaaataaaattgacacaaaacaatctgtacatatttaaagtatgcagtttgatgagttttaacatttgtatacacctgtgaaaatagcatcacaatcaacataatgaacatatgtccatcaccccaaaaagtttccctcktcatccctaggtaaccactgttctgctttctgatattacagatttgtttgcattctctagtgttacataagtagaatcatacagtatgtacttttattatctaacttctgtctcttgccataattattatgactatttatattgcatgtatcagcaggtcattcctttttttgctgagtagtattccagtgtatgaatataccacattagtttccttattcacccatccaatggtagacattgggttgtttccaagttttgggctactacaaataaagttcttatgaacattcatttttcaaatacctatatggacataattttaattgcatttggtaataaattttgatttatatttacattgattatatactctattacttatatttatatttacattgattttttttttgagacaaggtctccctctctcttcctggctggagtgcagtggcataatcacggttcactgcagcctcaccctcccgggctgaagcaatcctcccaccttggcctccctagtagctgggaccacaggcatgtgccaccactgcctggctaattttttaattttttgtagacaaggttttgccatgttgcccagggtggtctcaaaactcctagactcaagtgatatacccgtctcagcttcccaaagtgctgagattacaggcgtgagtcaccatgcccagcacattgattttatatgatcttaaattcagtacctattgtgttagataccatgctaagtattttcatattgttagatttatggtacatttgccaggcccaaattaggaaaatataatgacaaaaagattttttttaatcagtactatcctggaaatataggacatgattattatggtttattgtttgttcatagtttgctgtgtcatagattcatatcttttctctttaatgactgtatggcctttgagagaaacataccccctatatactatagcaaatagcatatagtagctatttgctaaattttaaataactttctgctctcatttatcaaaataatcgttcttttgcctcacaggtttcttccaaggtgaaatccagtcccacctggtattcagcatcttccttctcttcttcagtggtgagtttatttggcatagaggttgacttctgagaaggaattcagtatagttttgggtatctctatcttctttacataattgtcatcagagtgtatgtgaaactttctagttttttcctccttttggattatttccctcctgaaatggattaccatgtcaaaagatacaaacaktttcatggcttctagaggttctgctgaccctgccagatagttgtcttcttcttaatgacctttagagtggtttttacagatcatctgtctgtcaaccacttccagcatctaaaatctaataaataaggactattgctcaaattctttctacacagaartatgcacacactgtaccacagtaggtcaccattttttggttcatagaccgctttaaaaatttagtgtcccagcactttgggaggctgaggcaggtggatcacgaggtcaagagatcgagaccatcctggccaacatggggaaaycacatctctactaaaaatacaaaacttagctgggcatggtggcacgcacctgtagtcccagctactctgcgggctgaggcaggagaatcgcttgaattcgggaggcggaggttgcagtgagccaagatcgcaccattgcactccagcctgatgacagagcgagactccgtttcaaaaaaaaaaaaaaaaatttagtgaaaggggccgggcgcagtggctcacccctgtaatcccagcactttgggaggctgaggcaggtggattgtcagagttcaaaagttcgagaccagcctgggagacatggtgaaaccccatctctacaaaaaattagccaggcgtggtggtgcgtacctatggtcccagctgcctgggagggtgaggtagagggactgcttgagcctgggaggcagaggttgcagtaagccaagattgtgccactgcactccaacctgggtgacaaagtagactctatgttaaaaaaaaaaaaattagttaaagtgagctatatctcagaaaaaaatacatagaaacattttcaaaatctttttttttttttttttgagatggagtcttactctgtcacccaggctggaatgcagtggcgtgatctcagctcactgcaacctccacctcccaggttcaagtgattctcctgcctcaacctcccgaatagctaggattacagtcgcatgccaccaaaaccagttgatttttgtgtttttagtagagacaaggtttcaccatgttgtccatggttggtctagaactcctgacttcaactgatccacctgcctcggcctcccaaagtgctgggattacaggcgtgagccatttgcccagccaaaaatcttttgatcataaaggtaatacatgctcacagtaatgtaacagtcagctgggccaaaaagtcataatagctaatctttattaacagagttgctgcttttttagtataagcttcataatatcgtgtttctactcatgaagttccactgtgtgaatagcagggaatttcccattctcagagagatcacagtattgagaggctgtgccacatcttaatatatactatagtctgggcacgatgactcacgcctgtaatcccagcactttgagagcctgacgcaggtggatcacttgagcccaggagttcgagaccagccaggcaatatggccaaaccccgtctctatcaaaagtacaaaaaaattagctgggcatggtagcatgtgcctgtagtcccagctgctcaggaggctgaggtgggagaatcacctaagccctgggggttgaggctgcagtgagtcatgatcacactacactccagcctgggcaacagagtgagaccatgtctcaaaaaaataaaaaataaaaaataagggccaggtgcagaggctcacgcctgtaatcctagcactttgggaggcsgaggtgggtggatcacctgaggtcaggagttcgagatcagtctggccgacatggtgaaaccccatctctactcaaaatacaaaaattagttgggtgttgtggcgggtgtctgtaatctcagctactcgaagggctgaggcaagagaattgctcgaacccgggaatcagaggttgcagtgagccgagatcataccactgtgtgctccagactgggggacaagagcgaaactctgtctcaaaaaaaaaataaacacacacacacagaatagatagggatattatgtgtctctttcctagtggtaacatttctaaagaccagaagattccgttatcaacttgttttctttccttttggtgcaagggaaagggaaaagcaaagcaattagctaatacaaagtttcatgtttttgtttgtttgtttgtttgtttntttttttcagccaactgtaaagctcttcattggtgggaaattcgttgaayccaaaagtgacaaatggatcgatatccacaacccagtaagcgaagctgctttgggacttcaacttatgagcctagaattctagggacatgatgggcaagaagggacctgggtgtctgttgtaaagcacatagtgccacttctgtgactggatgtacagtggagaaggtgagtcaggcaaaggatcatgtgcttatttttctcatcaggccaccaatgaggtcattggtcgggtccctcaggccaccaaggcagaaatggatgcagccattgcttcctgcaaacgtgcttttcctgcatgggcagacacttcagtattaagccgccagcaggtcttgctccgctatcaacaacttattaaagaaaacttggtatgaaatctaaatggtatgcttttccaaactgtcacctagggcatgtttgtcactctcacagagaccttttcagccaccctcccttactctgcagtatgcagagacgttgatcatgactctctcccttgtactgcatctcctccagtcttattcttcctttgctacctcagaatttaaaagaggaacattcttgcatyaatttctatttgtgtrtcttctctctagaaagaaattgccaagttaatcacattggaacaagggaagaccctagctgatgctgaaggagatgtrtttcgaggccttcgtaagctgggagccccttatgggacttttgggaaggaccaaaggaagatgggaggcaaagatcgcagaatgggaggttgcttcttcctttacatagattttgccatcccatgatatcttttttaatacttgtgaaaaatggcagtattcagtatccctaagactgatttactttactctttactcaaatgatcttccagtgggtatatacatatcgcygtatttttcccattcagagaatctcattttgcacaaacccttaacttggaagggcaagtcagtgtaccctgcrccccttcattggcctgaaccacttcctgtcctcagggctgaagagaacaggacaaagctaactagtacacagtgtggagagctgatggcctgacttctgtgttccagaggtggttgagcatgcctgtagtgtgacatccctcatgatgggagagaccatgccatccatcaccaaagacatggacctttattcctaccgtctgcctctgggagtgtgtgcaggcattgctccattcaattttcctgccatgatccccctttggatgtttcccatggccatggtgtgtggaaataccttcctaatgaaaccatctgarcgagtccctggagcaactatgcttcttgctaagttgctccaggattctggtgcccctgatggaacattaaacatcatccatggacagcatgaaggtaactgcccttntgcatatggctacttaatctggctaccaaaaaatcaaggtgttgagtgatggttggatgttttaggataaggaacctacttgtaaggaggaaaggatttactcattttaacctccatgtttgttgatgattttgccatctttgtgcgccaaggtaactgaytggggaatagcagtgcttgttgccctacagtatatattgggacactagaaatatggattagggctagacacagataagattaaaaagaaacttttttcttcagtgtgaagagaatacatgagggtatttaattcagagaatttgcagatctcagagatactgaaggccttctaattcatgtaataatagctaatacttaaatagtgcttctgtgtttcaggcaccgttcctagtgctttttatctattaatctttataatcaccctttgaggtaggtattatttttccattttgcagaagagaaaaatgagacatagtgaaattaattagcccaaagtcacagtgctagaaaccgtcaaagccaggatgtgtatacccatccaggaaggctgactctgatttttgcttttaaaaactacactatattacctcttacatgagaacacaatagtgtctgagtgtcccagtacatagtcaccattgaggaaatattgttattcttttttttgagatggagtctccctctgtcgcccagrctggagagcagtggtgcgatctcggctcactctacccgctgcctcccaggttcaagcaattttcctgcctctgcctcttaaatagctgggattacaggcatgcgccaccgtgccccactaattttgttatttttagtacagatggggtttcaccatgttggccaggctagtctcaaactcctgacctcaggtgatccacccgcctcggcctcccaaagtgctgggattacaggtgtgagccactgtgccttgcctattgttattcttaaaggacaaaaaagaagggttcagtattcaaaggctgttattttggaggaaaataggagttgcagccttcaaagttagattaaggctgggtgcagtggcacatacctgtgatcccagcactttgggaggtgaaggcaggcggatcacttgagcccaggagttcgagaccagcctgggccatgtggcgaaacccccgtctctacaaaaaaaatacaaaaattagccaggaatggtggcatgtgcaggtagtcccatgaggtgggaagacagcttgagcctggcaaacagaggttgcagtgagccaagactgtaccactgtactctagcctaggtgaaacagtgagaccctgtctcaaaaaaaaaaaaaaaaaaaggttagattagaagtagaaattctggaatagcaaatgagaaaaatcatgaaaggaaagagactaaatagaatttatttttatattttttattgttttgagatggagttttgctcttgttgcccaggctgaggcgcaatggcacaatctcggctcgctgcaacctctgcctcccgggttcaagcaattctcctgcctcagactcccaagtagctgggattacaggtgcccaccaccacatttggctaatttttttgtatttttagtagagacagggtttcaccatattggctaggaaggtctcgaactcctgacctcaggtgatccacctgcctcggcctcccaaagtgctggaattacaggcatgcgccaccgtgtccagccggctaaatagaatttaaaagaaacaaggagagaacttcacaatgagaatccagtacagaaaaacacaggcctgatgcagtggctcacacctgtaatcccagcattttgggaggccaaggcgagtggatcacgaggtcaggagttcaagaccagcctggccaagattgtgaaaccccgtgtctactaaaaatacaaaaattaggcaggcatggtggtgggtgcctataatcccagctgcttgggaggctgaggcagagaattgcttgaacctgggaggcggaggttgcagtgagccgaaattgtgccactgcactccagcctgggcaacagagcgagactccgtctcaaaaaaaaaaaaaaaaaaaaagaaaaagtaaaagaaaaacacaggaaaacttcaaatccatagcagtggggaaaggggaaatttgccatgttgagaatccatttgctcctttgtgagtgatcatttattytcttcttaaagctgtaaattttatttgcgatcatccggacatcaaagcaatcagctttgtgggatccaacaaggcaggagagtatatcttcgagagaggatcaagacatggcaagagggttcaagccaatatggtgacttcttattccttttttctccaatctttgttctatatatgaaaattacctaggaacagaccttcagcagagaggccactcatcccactccaatgtcagtgtttctttcttttttttgagacagagtctctctgtcaccaagctggagtgcagtggcatgatctcggctcactgcaacctctgcctcccgggttcaagcgattctcctgcctcagcctcccgagtagctgggaatacaagcacatgccacagcgcccggctaatttttctattttttttcagtagagacagggtttcaccatgttggccaggatggtttcgatctcctgacctcatgatctgcccgcctcgrcctcccaaagtgctgggattacaggcgtaagccttaccatatcctcctgaatgtcttctctttaatcatgaaccttttgaggagtttcattctaagtcacgttaatcactttttttctttttttttgagacagagtcttactctgtcacccaggctagagtgcagtggtgccatctcagctcactgcaacctccacctcccaggttctaacaattctcatgcctcagcctcctgagtagctgggattacaggtgcctaccaccacacccagctaatttttgtattttaagtagagacagggtttcttggccaagctggtcttgaactcctgacctcaagtgatccacccacctcagcctcccaaagtgctgggattacaggcatgagccaccatgcctggcctctttcttgaaattctacatcaagaggtctactttctgttttgcctttcagctggttactggcattattgctgtaaggctgtaagttctttttttttttttttttaacattgctcttcatataactaaaaaacccagcagacaacaaattcctgttttttgtttgtttgtttgttttgagacaggggtctcactctgtcacccagtctggagtacaatggtgtgatcttggctcactgcaacctccgcctcccaggatcaagtggtccccctacctcagcttcccaagtagctgggaccacagactggtgccattatgcctggctaattttttgtattttttgtagagatggtgtttcactatgttgcctaggctggtcttgaactcctgacctcaagttatccttctcacctcagccttccaaagtgctgggattacaggcattagccaccacacctggtccactgcttaatttcttagcttagttgtatttggccaaggaagactcatgtgctttctgcatttttttttagggagccaagaaccatggggtagtcatgccagatgccaataaggaaaataccctgaaccagctggttggggcagcatttggagctgctggtcagcgctgcatggctctttcaacagcagtccttgtgggagaagccaagaagtggctgccagagctggtggagcatgccaaaaacctgagagtcaatgcaggtaatcaatcacctgacttgcccccttagattttgcatctgtggcattaagctcttgggttctgtcactggccttggccagtgggaacaatcatgtctattcttgccatttcctctctttatactgtacttgtcatttggagtcatcttgttagcagtctttttttttaaagcacaggctgtctgttacccaagctggagtgcagtggcaccatcctagctcatggcagcctcaaactgttgggctcaagtgatcctcctgcstcagcctcctgagcagcttggacyacaggtgcgggccaccacctggctaatttttttattttttgtaaatatgaagtctcactttgttgcccaggctggtctggaactcctgggctcaagcagtcctcctgccttggcctcctaaagctttgggattacaggcatgagccctggcagcagtcataatttatgtyaatgaggaccttaaattcttctgtgttgttttacaggagatcagcctggagctgatcttggccctctgatcactccccaggccaaagagcgagtctgtaatctgattgatagtggaacaaaggagggagcttccatccttcttgatggacgaaaaattaaagtgaaaggctatgaaaatggcaactttgttggaccaaccatcatctcgaatgtcaaggtgaacaactttcacttcacaaatatgagagctgaaggcaccttaaaggctatagaatctcatccctctaatttattaatgaaaatacttaatgactaagaccttatctcttgccaggattgatcaattattttatctggagtctgaatgagcctctccttctaactcccaaccaaactctttccactataccagcagtctgcagactttccataaagggatagatatttccagctttgcagggatatagtgtctgttgcaactaaactctgacattgtagtgtgagatcagctataaacattgtgtggctgtgttccaaaaaaaatgttatttatggacactgatatttgaatttcatatcattttatatatgattaattttttttcaaccatttaaaaatgcaaaaaccatttttaacttggggctgtacaaaaacaggcaggaagccacatttggcccacaggctatagtttgccaaacgctatcttatcttatactggtttgttaatgttttctctcccctctccctcttgctgcctagcttatggctactgcagtgtctcaatcaatatatcaaccacccaatatttattgaaagtgacaaaaataattgacttgtcaatttttatttatcaaaactttgaaagtctctcagctaacatgacttaaaaattgaggttatgaggcattttttgaaattcatatatccttactataatagtgaatcatcaagtgttgaatgtaagtgcagtagaaattatgaaatctcttgccacagaaccatacagaaaaatccgtttatcagcaacaaacattaattgcatggtgaaggatgttttgagtgtctgcgacctgatatcaaaatataaacatayagacatakttgggaggcaaaggagtgaataagaatggattatttatgttacagaaaacagcatggggtttctgtaaagagaaaaattatcctggtatatttactatagattggatttataaaaaataaattttcatgtaactttttgataacaattggatgaaactagtcgttcaggtattaaaaaggcagctgatgatgggtcatgaactaaagatacagtcccttaaaggaagtgtggttattgttgataggaattccaagttgtttatatgattggtaacttggaagacggaatacacttgagagaggactttttttttaaataggtgatttgaaatgaaaagagattagtaatatgaaagttgtccacgtaaatgatgtgtagtaagtgaaagtaccaaataagcataaaatactcagaatccaaaaagctgacttcttttctggatgcatcactcctggcagccaaatatgacctgttacaaagaggagatttttggtccagttcttgtggttctggagacagaaacattggatgaagccatccagattgtaaataacaacccatatggaaatrgaactgccatcttcaccaccaatggagccactgctcggaaatatgcccacttggtggatgttggacaggttcgtgaacagaatttttaagagattcttatatccatttactatttcctaagaggaaacagtaaataatggtgagtcattggtttaagattgcccccatgacctcccacattgccccatttcttcctcaggaatgaaagttcatggggtagaggatagggtagaaggtgggtatttaaaactggtctctgatgcctttgtgtttctaaatggagagttcctttgtccttaggatatgacacrgatttgttctgttttaggtgggagtgaatgtccccattccagtgcctttgccaatgttctcattcaccggctctcgatcctccttcaggggagacaccaatttctatggcaaacaggtaacttttgagttaaattttttgtcttttcctttaaganattttcttaaagatattcaggagcaaggattctgcaaggaagggactgccagcagcatctgtgaggtcataatcagtgcttctcagaaggttccctaaaaaagatttaaaagttaacaaaattttgccaaagctgcttcttcctgaataattcaaagcaacaaagttttgaggaaagagcatggggaagtctaagcctttgtatatgccatttcctgagtgtgtgaccctcttccccatctctcccctttcatctgactaactcctaatcatctgtcatgtctcactttaaaaaatgagctcctccagaaaatctcctccaactaccaccacccctccctcagtgctgggtagtgtgaccccagtgtgttcccattgcacgtattttttctgtaatagttattcatttacaaaaaatgttgttgagcacgttctttgtagcagacattattattactattattattattattttttttttttttgagacacagtctcgctctgttgcccaggctggagtgctgtggcatggtcttagctcactgcaacctccgcctcctgggttcaagcacttctcctgcctcagcctcccgaatagctgggactacaggtgcctgccaccatgcctggataattttttgttttttagtagagacagggtttcaccatgttggccaggctggtcttgaactcctgaccttgtgatccacccacctcagcctcccaaagcactgggattacaggtgtgagccactctgcccggtctgtagcagacattattttaggcactatgaatacagcactgaacaagaaaagtaaagcagatctggaaccaaattgcctgtgttcaaatcccagctaagccagttattagctgtctgactttgggggataccattaattttttttttttttttgagacagagtctcactctgtcgcacaggctggggtgcggtggcacaatcttggctcactgcaacctccgcctcccaggttcaagcaattctcctgcctcagcctcccaagtagctgggattacagatgcccaccaccacacttggctaatttttgtatttttagtggagatagggtttcaccattttggccaggctggtctcgaattcctgacctcaggtgatccgcctgcctcagcctcctaaagtgctgggattacaggcatgagccaccacagccaaccaggataccttctttatgccttaaatttattcacgtataaaatgaataacaatagtacctatgtatttcataacattgtaaggactgaattatcactattggccaggtgcagtggcttacgcctgtaatcccagcactttgggaggctgaggcaggcagatcacctgaagtcaggagtttgagaccaatctggccaacatggcaaaaccccctctactaaaaataaaacaattagccaggtgtggtggcaggtgcctataatcccagctactcgggaggctgaggcagaagaatcctttgaatctgggaggcggaagttgcagtgagccgagattgcaccactggactccagcctgggcaacagagcaagactccatctcaaaaaaaaaaaaaagaagaattattactattgccacatcggccaacaggtgcatatgtcccgaggcaggaagaagcatggcacattcagacagcggaaatgggctggggcacagtgagcaaatgagaagaaaaggaagaaatgaagttagagaggcaggcaggggttgagtcatgtagggctctttaagccatttaaagaagccctcatcagactgtagttgttatctacttatctgcagtacctggmacagagcaggctgcccaaacatttgttgaacaaataggctaggggaagttctttctagtcataggactagagccattttgaaaccttcattaataaattacatgttttgttatacaagtctccccttttataggttgattttttttttctgtgccagctrtgtgctgccacagggcgagggatgtggggcttttttattttatttatgtttgggttattaaaaaattaacaatgggattgcatagcattatgacagtgtggccaaatggttaagaagtcaacactttggtatttggaggttgattatatagtttgtatattagtcacagcttttggttttttgttttggggtttttttgatggaatctttctctgtcacccaggctggagtatagtggcatgatcttggctcactgcaacctcagcctccagggttcaagcaattctcgtatctatgcctcccgagtagctgggattacaggcacgtgccaccacacccgccaatttttgtatttgtagtagagacggggtttcgccatgttggccaggctggtctcgacctccttacctcaggtgatctgcctgcctcggcctcccaaagtgctgggattacaggagtgagtcaccgcacccggcctagtcacagcttttgtaaaaatgactaatttgatactagtaacatttcttttaagcaaaacagagtacaactattgtttaaaaattgttccctgcccaccctctccatttatttatttttttgagatgggagttttgctctgttgcccaggctggagtgcaatggtgcattctcggctcacttgcaacctccacctcccaggttcaagcaattctgcctcaggctccaccacgcccagcttttttttttttttttttttttttttttycccagtagagacgaggtttcgccatgttgggccaggctggtcttgagctcatggcctcaagtgatccgcctacctcagcctcccaaagtgctgatattacaagtgtgagccaccgctcctggctgcaccccccagtttaattattataaattactctggtaatctggtaaaatgtcattctagcttgctagtaattatataagtgttagatctgcacaatgtattctcttttgctcaagcctactcttataaactatatctatatatagagagagttaaatatgctgaatttttgggctcacatgttataggtaattgagaagtgaatttgtataatgtcagacattttactttagatttctaagatactttgggtttgccacttcaatatagagctcatgatctctgataattatcagaaatggccgctgggtacagtggctcatgcctgtgatcccagaactttgggagaccaagactggcggatcacctgaggtcaggggttcaagaccagcttggccaacatggtgctagccaacatgggctaatctgaaattagcccttctctactaaaaatacaaaaatagctgggcatggtggcacacacttgtaatcccagctattcagaaggctgaggcaggagaatcacatgaacctgggaggcagaggttgcagtgagccaagatcacaccactgcactccagcctgggcaacagagcaagactctgtctcaaaataaataaataaataaataaatggcctactatataatagctgggggcacggtggctcacacttgtaattccagcactttgagaggccgaggaaggcggatcacttgaggccgggagttcgagaccagcctggccaacatggtgaaaccccatctccactaaaaatacaaaaattagccaggcgtggtagcaggtgcctgtaatcccagctactcgagaggctgaggcaggagagctgcttgaacccgggaggcagaggttgcagtgagctgagatcatgccactgcactccagcctaagtgacagagcaagactccatctcaaacaaaaaagaaagaaatactagtttcagcataataatgatggctaaggtttgattgtttactatctgccaggtattatgttaaatgttttagatcaattatcttaggaacaatatatattggattctgattgcatttctcaattaggaaagtgagtagcactttataatacctccttcaaaagctaattaaaagaagaatcatgaaaccccagaaatatatgctaactttttttctgttttccttagggcatccaattctacactcagttaaagaccattacttctcagtggaaagragaagatgctactctttcctcacctgctgttgtcatgcctaccatgggccgttagaaacaagtttgtttaagactgactccatcctgagtaatctccctttatttttgaccagcttcatttgtcagctttgctcagatcagatcgatgggattggaatacattgtaactaaaatcttcctcaggactattaacccctgcaaagtttctayagggaactgcctagtgtaacaatgaaaccagatttctcacttgctcttcatacttctattttgaggtaactgttgtaactatgaaatgcttatctgaaagtagtgcttaaacctgatttctaaaaattatcccattttctgatgatttgaaggggagaaaagccagtgtatgtaaagaaaatgttccagccaggcgcggtggctcacgcctgtrrttccatcattttgggaggccacagtgggcrgaytgcttgagcccaggagttgaagaacgtggygaaaccccgtatctattatttaaaaaaattgaaaaagtaaaaaaagaaaagggaaaaaaaattttttaaagaagatgttccaataattgcaagaagaactcttagatggggaaacaggacagaaataactcaccgcttttggttgatcctcaaacatagcgctacctaaatgccactgggagagacctcctgcaaagttttctttagcccctcttttatcccacaatacacaagatataatccatttttatatatcccaaagttgtggcaacagcttctttcttttctgctcaatgccactttgtttcctagtaattcatgaccactattaattctatcattgtcactgctcctgcttaagatcacttctcaaggatacctcagtaagcaatggataaatcaactttttgttatatgtgccaagtactaagtttcagggttctcttcagcaatcattaattaatacttcagccattaattcagatgcaaataattttcttttttcttttttttgagatggagtttcactcttgttgcccaggctggagtgcaatggcgtgatctcagctcaccgcaacctccgcctcccaggttcaagcgattctcctgcctcagcccccctagtagctgggattacaggcatgcgccaccacacccagctaattttgtatttttagtagagacggggtttctccgtgttggtcaggctggtctcgaactcctgacctcaggtgatccgcctgcctcggcctcccaaagtgctgggattacaggcatgagccaccacacccagccagatgcaaataattttcttagaaaattatttcaaaagttattttaggcccagaaatcaaggattgttccaaccatgaaaatgggtaagacacctgccttaagcaaatctaacctgctattacttgccaaattttatatattcttttctcttgcctgtatttctaattagtgatttgtttaatgaagaactcttcatgtagagcaattaactgggcctaagaaatttcgaagctttccatgacataaagtggttaaaaaaaaatgctttgacagtcttcttctgccattagttcaactgcctttacgctttttttttttttttttttttgagatggagtttcactcttgttgcccaggctagagtgcaatggcgtgatcttggctcactgcaacctctgcctcccgggttcaagcaattctcctgcctcagcctcctgagtagctgggatttcaggcatacgccaccatgcctggctaattttgtatttttagtagagacagggtttctccatgttggtcaggctggtctcgaactcccgacctcaggtgatctgcctgccttggcctcccaaagtgctgggattacaggtgtgagccaccacccccagccgcctctatgctttttgtttctttgatatatctaaacttaaggtcagaacagaaattcatgtgctgaacagaatggattctttttgcagtaccaayccaattgaatcctctttttattttcctgcgtccttaccagtcactttgatagtgctaactaacctacactatgggggttattcatgaattaagtatgataaaaaaaaaaaagaccttgaaaatgttgtgtaccctgtggatttgaggcttattactaccacctggctggataaaatgtcaaaaccttcaatcacttaaggtgactggaacttttgtaaaatacacttatgatcctactgggccttttttttttttttttctgctttcctaaatatgaggcaatagaaatttataatttgagactacagtaccccttgttttagctcttatcacagctggcaactggtagtgattttttttgttgttgttttgttttgttttgagatggagtctcgctctgttgcccagggtggagtgcagtggcacgatctcggctcactgcaacctccacctcctgggttcaagtaattctcctgcctcagtctcccgagtagctgggattacaggtgcatgcccccacacccggataattttttgtacttttagtagagacagggtttcaccatgttagccaggatggtctcaatctcctgacctaatgatccgcccacctcggcctcccaaagtgctgggattacaggcgtgaaccaccgcacctggccctggtagtgatatttaatccaatccaacaactataggctgggttaaataaaaggtcattattgtctatattccaagtggaattaaatgtagtcacagagattcctaacattttccttatatttaagggaaatcacttctaaaaaaacacactaatcagaactgtgatgctctaattagaaacaactcatctggccaactatttgctgctcagagtttctyatttcttagatgaaaaaaactcatcagttatattcatgtgatcgcggctaaaaagtcagtattttctttttgttctaatgtggcttcatttgaaatttctcagattctacattgtactaattatgaataacaaattataaattaaaaactcttaaagagaaaaacttggcttaaaaaaatcatttcatatctccttataagcctttgtcctctaggttgtaatgactctgacttcccacctgtgatggaaagctaagagtcacaaggtcactatgtttactcttacgtaaaagatagtacacattttggctaggctgtttacttcaaaaggcaacstataggtttctacacaaaaagaggcacacatttgcatttgcattagtataatatgcatttgtacggatattgctttaaaaatttatgtaatctactaatgctatttattactcattccactgatccctgaagtctctcaactagtagagaaaataaccgtgatttagcaagaagcgacatggggaagggtgacaacaatatacattgtttgattagatacagactccttactgtgtcagactcctgaggttcttttggaatagtgggtagcaccacttcaccagaagagtctgatattgcaatttgctgggtgatgaagatttyatcttgaagcttactttcatccctgcaataatgacaaaataacagaaccgtcaacaactctacacacatgaaacctggtttagaataacagacttgtcatattactttcaattagcacattcaagatgcccacaagaaccatcgtgttgggctcatgtttattacttaagcaagagagctcttacccaaattcctttgtttccccactgtcagaaacaacatagtctggaactggaggcctagaactctggttgtatttcctgtagtgggtaaaagtcaacaaagataatgaatgaggcagtgtctcctcatgccttcatattttctttttgtattttaatttttttttattttttatttttgtgggtgatagtaggtatacgtatttgtggggtacgtgagatgttttgatacaggcatgcaatgtgaaataatcacatcatagagaatgaagtatccatcccttcaagtatttatcccttgtgttacaatccaattacactcttttagttattttaaaatgtataactggccaggggcagtggctcatgcctgtaatcccagcactttgggaagccgaggtgagtggatcatctgaggtcaggagtttgtgaccagcctggccaacatggtgaaaccctgtctttactaaaaatacaaaattagggccgggcacagtggctcatgcctgtaatctcagcactttaggaggctgaggcgggcaggtcacctcaggtcaggagttcgagaccagcctggataacatggtaaaactccatctctacaaaaaaatacaaaaattagccaggcatggtggtggcccctgtaatcctagctactcgggaggctgaagcacgagaatcacttgaaccaggaggcagaggttgcagtgagccgagattacatcactgcactccagcctgggcaacagaatgagactccttctcaaaaaaaaaaaaaaaaaaaattagccgggcgttgtggcacatgcctgtagtcccagctactcagtaggctgaggtgggaggatcacttgcacctgggaagtggaggttatagtgagctgtgattgtgccactgcactctggcctgggtgacagagtgagaccccatctcaaaaaaaaaaaaaaatacttatctttgcaaaccaataaaatcttaatattgttatgtttctcttcagttgccactcattcagctgagcaatattgtaacttcttaataagcactaccttaaacatctaagatgaatctttcccctccccctttaattccaactcatctttcattttcatgctcattcattaatctcccattctttatctctgggagctgcagtagttaagcagtagggcctttttatattttctggtcctttcccgtccctttagttctaagtaagaaaaataagttctttgttcctaagtggtttctagatttgataacaacttggtatttcactgcagaaatagggagttacctagaaggacagccattcatttttgcaaagagcaatcgcaatactttttccttctgctcccaggtcaaatctccaatatccacatttccttcaatatgtgtcctaaagaatttcaaaggaaaaaaatgtgaaaaggaaaaatacggtcaaataggcttctcttctttttaaaaaatatataatgggtaaacataggataaattccacaccataattgaatattatgaaacaactacaggccaggcgcggtggctcacacctgtaatcccagcactttgggaggccgaggcgggtggatcatctgaggtcaggagttcgagaccagcctggacaatgtgatgaaagctcgtctctactaaaaatacaaaaattagctgggcatggtggcagctgtctgtaatcccagctactcgggaggctgaggcaggagaatcgcttgaacccaggaggcggaggctgcagtaagctgagatcgcgccactgtgctccagcctgggagaaaagagtgaaactccgtctcaaaaaaaaaaagaaagaaaaaaagaaaactacaaagcaaactatccatcacaaaatcataaagttgataaggacaacaatatactagccaatccgaaatgttacatatcataaagatgaaaatgacaaaaactttaacaacatgaaaaaatatttgtgctcagacattaaggaaataagcaaagtagaaaactctaaggaggctggggacggtggcttacccaacactttgggaggccaaggcgggcagatcacaggttaggagttcgagaccagcctggccaacatggtgaaatgccgtctctactaaatatacaaaaattagctgggcatggtggcaggctcctctaatcccagctactcaggaggccgaggcaggagaatcgcttgaacctgggagatgggaggttgcagtgagccgagatcactccactgcattccagactgggtgacaaagcaagactccttctcaaaaaaaaaaaaaaaaagagcctgggtgcggtggctcacacccgtaatcccagcactttgggaggctgaggcgggaggatcacaaggtcaggagttcgagatcagcctgaccaaaatggtgaaaccccatctctactaaaaatacaaaaattagctgggcatggtggtgggcacctgtaatcccagctactcaggaggctgaggcaggagaatcacttgaacctgggaggtggaggttgcagtgagctgagatcgtgccactgcactccagccttggcaacagagcgagactccgactcaaaaaaaaaaacaacaaaaaaaactgtaatgtaacattatttatttagagacacagacaaagggaacaagaaaaaaaaagttgtttaggccaggtgcggtggctcacacccgtaatcccagtaatttgggaggccaaggtgggtggttcatgaggtcaggagatcaagaccatcctggctaacatggtgaaacgctgtctctactaaaaatacgaaaattaggctgcgcgcagtggttcacacctgtaatactagcactttgggaggacgaggcgggcggatcacgaggtcaggagatcaagactaccctggctaacatggtgaaactctgtctctactaaaaaatacaaaaaaattagccgggcatggtggcaggagcctgtagtcccagctatttgggaggctgaggcaggagaatggcttgaaccctggaggcagatcttgcagtgagccgagattgtgccactgcactccagcctgggtgacagagcgaagactctgtctcaaaaaaaagaaaatcagccagacgtggtggcatgcacctgtagtcccagctcctcgggaggctgaggcaggagaatcgcttaaacccgggaggtggaggttgcagtgagccaagatggcatcattgcactccagcctgggcgacagagtgagactctctcaaaaaaaaaaaaaagtttaggttttggccaggtgcggtggctcacacctgtaatcctggagctttgggaggccaaggtgggagaataccttgagggcaagagttcaagaccagcctgggaaatgtagtgaaacccttttctctataaaaataattttaaaattagcctggcatggtggcacatgcctgtagtcctagctacttggggggctgaggtgggaggatcgcttgggcccagtcaaggctgcagtgagccatgatggtgccactgcactccaacctgggcaatagagtgagaccgtctcaaaaaaataaaaaagtcggccgggtgcagtggctcacacctgtaatcccagcactttgggaggccgaggcaggcagatcacaaggtcaggagagcgagaccttcttggctgacatggtgaaaccccgtctctactaaaaatacaaaaattagccgggcatggtggcacgcacctgtaatcccagctacttgggaggctgaggcaggagaatcgcttgaacccggaagtcagaggatgcagtgagccaagatcgccactgcactccagcctggcgacagagtgagattccatctcaaaaaaataaattaattaattaaattaaaaagtctaggttttgtcttatgattaccatatacttcattttttaaaaaatttattttatttattattattttttgagactaggtctcactgtgttgccaggctggagtgcagtggcatcatcatggctcactgcagccatggctcactgcagccatggctcactgcagcctcgaactcctgggctcaagcaatcctcccacctcagcctcccgagtagatgggactacagatgcacaccatcatgccaggctactttttgttttgttttttgtagaggtggggtctcactgtgttgcccaggctggtctttaactactggactcaaatgatcctcttgcctcagcctcccaaagtgctggaattacaggcatgagccaccacacccagccgattaccatatacttcaactgtccttttccaatctaccatttaaatagatgatgtaatttttttttttttgagatggagtcttgctctgttgcccaggctggagtgcagtggcacaatcttggctcactgcaacctctgccacccaggttcaagtgattctcctgcctcagcctcctgagtagctgggattacaggtgtgtgccatcatgcctggctaatttttgtatttttagtagagacggggtttcagcaacttggccaggctggtcttgaactcctgacctcttgatccacctgtctcaacctcccaaagtgctgggattacaggcgtgagccactgcgcccagcccgatgatgtaatatgttaaccaccatttctgccctgctgatagaggcaataggacactaaggctaaagtgttaaggtggtcagtagcaaaaatgtcacatagaacacagaataggaagagtccagttactgcagtaacaatgtagacaatcatttaacttcctctgaaaatgtataacacttactatttcgtaaacaaaaggatataaagaaaactgccttatatatggtagggactcaacttatttgatgtattaaataaaaaagagaaattacagcaaatctcttggtaacagtagtagtattacagatttctgaatatgacaagaagtaaattatagtttaggcattttgaagaagaatcttatctatcagagactactgagcatgtccaaccttctcaacagccatataattcaaaacaacctataaaattagtcctttaaaaataatttaaagcaaaaaacacatttggaagatgttaggctgggcatggtggctcgtgcctgtaatcccagcgctttgtgaggctgaggcaggaggatcacttgagcccaggagttccaggctgcagtccttttaagtttcttgagttagggcctttgaagaatctaattgcattggaatataaaataattttctttcagaataaccctcaaaatggactataatttaatccatggtttatagggaggagactgctctaagaaacaaaaatgctaataggaaacaaagttaatcattatgtaatatatagtctgcaactgtctcaaacattctgttacctttatcatagtggcagcagatctctaaaattttggaaaattttgggggacttttggttaatacaatgctgggggcactactgattgtcctccaatccatgggacagtt

SEQ ID NO: 94983 - DNA, 48914 bp, Homo sapiens
gcctcccaagtagctgcaattacaggtgcacaccaccacgcctggctaatttttgtatttttagtagagacgggatttcaccatgttgaccaggctggtcttgaacacctgacctcaggtgatccaccagcctgggcctcccaaagttctgggattacaggcatgagccaccgtgcccagcacgaatatatttaatgcaggttttaggtggcacacaagaaaagaagcagtttgagtcagttccttatatactgaattggacaaagagtggtaagttatgatgaagcaactaaattatgtggaaggacttaaaaggtaagagttattttaacaaggtctgtacagaattctcttggtcttgatttcttgtccttaaagataaggatattgcttctttcacatgggaatttcatctttagctttaaaggaacagcacaaggccgggcacaatggctcatgcctgtaatcccagcactttgggaggccgatgtgggcagatgatttgagcccaggtgttcaagaccagcctaggcaacatggcaagatcctgtctctacaaaaaatacaaaaattagctgggtgtgatggcacatgcctgtagtcccagctacttgggaggctgaggtgggaggatcgcttgagtccagaaggttgaggctgcagtgagccatgacagtgccactgcactccagcctgggcaaaagagtaagatcctgtctcaaaaaaaaaaaaaaaaaaaaaaaaaagaagaagaaacagcacaaaggttacagtgatctttttgcacctgctgtttttcttttttttcttttttttttgagtcagggcctcactctattgctcaggctggagtgcagtggcacgatcatggctcactgtagcctcaacctcctgagctcaagtgatactctcacctcagcatccctgctatttttcaaatgcctttaacttaaatggtatgccagaatggcttggtttttcgtttgtttgtttttgagccagtgtcttgctctgtcatccaagctggagtacagtggtgtgatcatgactcactgcagccttgacctcccaggctcaaaccatccttccatctcagcctcctgagtagctggaaccccagttatgtaccaccacacctgggtaattttttattgtttactttgtgtagagacagagttttgttattttgcccaggctgatttcaaactcctggcctcaagtgagcctcccgccttggcctcccaaagtgctgggattacgggtgtaagccactgcacctggcctctttgtttgagtttttaaagttttgggtttttttttagaattggggtctcattgtgttgcccaggctggtctcaaattcctaagctcaagcaatccttccccctcagatcctctcacctcagcctcctgagtagctgggactacaggtgtgtgcccagaaaaaacactgacaggtgtgtgcccagaaaaaaccactgatatacatatcagtatatacaggtgatggctcacacctgtaatctcaacactttgggaggctgaagcaggaggattgcttaagctcagaagttcgagaccaacctgggcaagatgatgagaccctgtctctaaaaaaataaaataaaataagaaaaattaggcatcctggtacatacctgtcttcccaggtactcaggaggctgaagcgggaggattgattgatcccaggatattgaggctgcagtgagaagtgatcacaccactgcactccagcctggatgacagagtgagatcctttcccagaaaacaaaaatcatatcctttttttaaaaaaaccttctgaatctctcatttttatatcttatacatttggaagagttggaataatttctatataatgctactgtcttagataacagacagattctaaatttttctgtaagctcagtagcctttagcctctagctgattatcaactccaagaacaaattccaaagtcaatgaccctgaatttcatttgagaaaaacacgaaggcactgcaaactatgaacattgttattataatagcaattgtatagtgctttctaatttttagaccactttcacatactgtttcatattacctcaggtttataaattaaacctatttttgaaaatatgagtattatagcctaaaaagctgttaaaaatgaaaaagactagattatccaagcagagatgcctaagtagcattaggggacatcctcatcagcgcagtgatttcaaagtcctggtttgtaacacctgactgatgtgttcattcaacaaatattcattaaggacctaatcctagtgtcaggctgcctagattaggaaacctgttaggtcttcagtgagaaaattacattctgtatatgaagaatgtgaggacactcaggcttaaaataaaattcaatctgtaaattattgttaagtgaaaggccctgttaaaatgggcaggaacaggattctgagtaattttttcctttctttttgtgtggatggttttctggctccccactgaaggagttgcaacagtagtaaacatactattgttcaggaaataaaaataaatgtggtgtgtgtgtgtttgatgtattaatagttctagaggacagactaagagctagtactccctaaagatcttttctttctttttttttttttttttttgtttttggagagcgagtcttgctctgtcgcccaggctggagtgcaatgttgcaatcttggctcactgcagcctctgcctccaggttcaagcratcctcgcgcttcaacsccccagcagctgggactagaggtgtgcgccaccacacttggcttttttttttttttttttttgtatttttagtagagacaggggtctcaccatgttgtccaggctggtctggaactcctgagctcaggcaatccacccacctccgcctcccaaagtgctgggattacaggtgtgagccaccgcatccggcatttgcttttactctggaggttgtgtccaagaagagtactgctaatggtgaaactaagccaaagcaacaaattgacaactggatgacctgagggagaggccagtgaaggaccctggatcacacagtatgggttcccaaggacttcttcctttaggagacctggaggtggcrgaaggggatccagttgcttttcttttcctcctctggttgtctggggaaggaaatgtggaaaaggagggggctttagtggcacccaagtttggctttaagcaagttgtgaggcaggcagtttctccttggatcttctacccctttagcaatgattccactccttttctatctctttttacccccaaatctgccctccaacacacacccatctaagaggtgtttctcttttggcattccttctgctccttgtggcatctttgtccctttgaatttcaccctgaacttgtaaactggccagcatcctctgtgacttctgggctgcttactgggtagtgctgacaaatatcctaagaagtttacatgtcctttaaatctccctagaaccagatttctgggtttctgataaatatccaccaacataagagtgaattttgatagcaaccttcatggggtcaacatctcgacctggtgtagtaagaagaaatttactttggacttgcacagagctggactccagccttagctcctttatggggaagctctacgacctttctattagtttcctcatctgtacaatggggatgataaaacctatcttgcatgattgtcactgagatatttgacaaagtgccacatactacctcctagctcaatctctgttagtttccttttcttttgtagggttattatgagcttcatgtgagaaagtaaatgtgaaagggctctgtaacctataaagctctttctacatgttggattttgctaatgaaaaataatacattaataatctaataataagggtggaaggagggagaggatcaggaaaaataactcatgggtactaggcttaatacctgggtaatgaaataatctatacaacacacccccatgacacaagtttacctatgtaacaaatctttacatgtacccctgaacctaaaagttaaaaataataatttaataataaaagcacagataggtaagaggaacagctagatatttaaaaggtagatattttggaggagatctgttttctttggggaagggtcttactctgttgcccaggctggagcagtggtgccatgatcgctcactccagtcttgaactcctggcctcaagcaatcctccacctcagtctcttgagtagtcaggactacacgcttgtgccaccatgctcggctaatttttaaaaatattttgtagagacagagtctcactatgttgcccaggctggtcttgaactcctggcctcaagcgatcctcctgccacggtctcccaaagtgttgagattacaggtgtgagtcctgtgcctggccagaggtttgtcagtcttatcatctatgaattaattcaatagacatcacgaccacatttccaaaacaaacatcaggaattatgatgtgacaagtcaaaatgcattggttggggacagaatcttttaaatagaaattgtcccataaaatttgagacgtatagtttctgtacctaaatgaccattcagtgatcttggaaatctatagtgctgctcgtcaccaactcctgatatgtttcaattctgtttgcaatggacaataataaaataatatgtgagtgtggcctcaggtattctgagtttgggcactgctgtttccatctgaggaccaagacctacacatctcagtagcactgaaaaagtgaacaaactggtatagagtgccagaaaacttgatcagaatacattatatatactctaaacctgaaaaccacactccctaatattgcgctggtgagctggcaggtaaaggaaaaaacattgagaaagacagcagcccccagaagagaaacaatcctaaaagaaatgtccaaattgccaattactttctgtttgtcaaagtctctactggaggtgcatggaagtttggtgagaagaatgaacctttgtgcaagatccctcagctgacagacctgtgagtgcctctgggtggctgctttgtcttacagaaggcattttgtttcctgacactttttcctgtggcctttgctcttcgtattctgtatgttaggcttctgtttctatcaatatttgtcattaatagcatttacattgctccttcagaatttatttattttgagacagggtctcgctctgttgcccaggcctgagtgcagtggcacgattatagctcactgcaagcttggacccccggggctcaggggatcctcccaccttagccgcccaagtacctggggccacaggcgtgtgccaccacacctggataattttttttttttctgagtttcactcttgtcacccagactggagtgcaatggcatagtctcggctcactgcaacccgtctcccgggttcaagcgattttcccacctcagcctcccaagtagctgggattayaggcgccygcsaccacacccagctaatttttgtatttttagtagagacggggttttaccattttggtcaggctggtctcgaactcctgacctcaggtgatctgcccgccttggcctcccaaagtgctaggattacaggcgtgagccaccgcgcccggcccaatttttattatttttattttatttttttatagacacgggatctctctctgttgcccgcaaactcctgggctcaagcgatcctccagccttggtgagagccacagcgcccagtctctctttaagaatttaaaaagcagtttcagatcacaatatcatctatctcgttcacagtccccttgctttttactgtcaccctttaaaaagcattatacaattacagaaacggtggtttagcagtgaagtaaccaccaaagactcttggcactccaatcctctgccttcttcaggcgataggattaagaatgggatcctaggatgcttacatgcaatgatgaacccgaaaacacttgcaaagtgctacgcaaatattgatcacgaagaaggaagtcctcttcccgcctggagactgtgtggggtatggcgsgrtggtggggagaatgtggtgtcttgctccaccctcctggcgaggggagggcctggcctggaccgcagaggaatcgagtgactgcccctaaaatctcctagaaccgatcccgcggccccgcccctcccgcggccccgcccctcccgcggcccgtcagcctctgccgcggagctgcgtccgccactcatgtttctccgagcmggcctggccgcgctctccccgcttcttcgcagtcttcggccctctcctgtcgccgccatgagcactggcaccttcgtcgtgtcgcagccgctcaattaccgcggcggggcccgcgtggagccggcggacgcctccggtaccgagaaagctttcgagccagcaaccggtaactgcaacgagccggggaggctggggcgccctggggccggatgcgcggatttcccggccagcccccgtttcctgtgttctgcagcgttgacttgagcacaagacagtgacagtggagagtctaaggttgtgtgtgtaggcaactagcgattctggggcaacgcgagtgcctccgggcagggatgggtagggaggaaaagcaaagctgatgagttgcgtggtaggatcgtgagttgttttacccgggccagaacagagttcgcaaagtactggtgggggaagtcgtgcctctgttaacttccttttttgtttgttttgtttgtttgtttgttttttgtttgttttgagacagggtctcactctgtcgcccaggctggagtgcaggggcaccatctcagagctcactgcgccctctaccttacgggctcaagtgcttctcccgcctcagcctccctggtagctgggattacaggctcccaccaccatgtccggctaatttttgtatttttagtagagacgggttttcagcatgttactcaggctggtctcgaactcctgagcttaggtgatcctcccgcctcagcctcccaaagtgctgggattacagccgtgagccaccaagcccagccaactgttcccccttttaaaaccaggactgatgtattattgtcttcaaatgtgtgcataggagaggaattctaaaagaacggggcggggttgtggggaagataatcatttgtgctgggaatgaaggaacgctcacagatagtttctaatgactacgaatgaggactttgtctccacattctaatattaaaatatttctgcacattaatcagaattgggaaaggaaaaaaccccacctttattcagtactttcttccccagctttattgaagtataattaacaaataaaaattgtatatacttaaggtgtaaaacgtgttgtaatgtatgtataccttgcaaaatggttaccacggtcaatctaattatccattgcttctgcatagttaatggctttttttggatagtgaaatatttaagatctattcttttagcaaatttcaagtatatgatgcagtattggtaaccatagtcaccatggtctacatgagctctccacaatttattcatcttgctgaaataaaactttttaatccaatgcttaatgtgtgctaagcactgtgctaggcactggatttactctgggaactctgaaggtcacagagataaggaagaaggggctttttgttttggttttgtgttgtgtttattttgctgggttttatggaatatatgtggggagaaaaatgtaaatattttgtgtaaaatgtagccagagcaataaaactgatttgcaggggactggagaatttagtatttgaccatccacactaaaccacagagcagtgacttggcagagccagaaggcattatcacatctcttctttatataggaggaaacagcttctctaccccgacttaatcctgatacaaaagaaagaaaaattgctctttgctttaattgcctacagtgtgtgtgatcctcagccaccgcctttaccagctggctattcaagtttgtaacagaaattgcagatttgtgaaatctccctggaaagagtcccaggagttcttgtgaagaggatttgctgagttggcaaacttaaagaattcttgttggtagaggcagtacagtccttgggctatgggcctagaaaaactgattgtttcataatttgcaccagaatagggagagggaataaaggtggaataagaaaaggaaatctgggaatttttgagaaaaaaaaaatgttcctttagggttgccttatcctgatattactgcttattaactatatttatcaagtatcaagtagtatgatataacctacatagaatatagacaagggatttacagtcagagtttataacccaatagactgattacttttgactttcattttacaagacccctgagattctgagataatgtttaggagtgttgcaaaacttaatcagaagttaatgttagtaaactcaactgtaaaatagtagagggcaggggttcttaactctaaatccttgatgagtttagggcaggggacatgacattcctgtaattctgttatatgtttaagtagatttttctggagagaggtctgcaacttttatcagactcctaatgtcaatgaccgcaaaatacagttaagaactgctaggccgggtgtggtggctcatggctgtaatcccagcacttggggaggcagaggtgggtgaatcacttgaggtcaggaatgtaagaccagcctggccaacatgatgaaatcccgtctctactaaaaatacaaaaattagctgrgtgtggtggcaggcgcctgtaatcycagctactcrggaggckgaggcaggagaattgctggaacccaggaggcaaaagttgcagtgagtcaagatcgtgccattgcactccagcctgggtaacaagagcgagactccgtcttaaaaaacaaaaaaacaaaacaaaaaaacctgctagtatagagatggtcactaaatcaaaccatacataaaaacaagaagttacrgtagcccackcctgtaattccgrcacttcgggaggctgaggcgggtgggtcacaaggtcaggagatcaagaccatcctggtcaacatggtgaaacccggtctctactaaaaaatacaaaaaattagctgggcgtagtggygtgcactggtagtcccagctactcaggaggctgaggcaggggaatygcttgaactcaggaggcagaggttgcagtgagccgagatcgcgccactgcactccagcytgggtgacagagcaagactccatctcaagaaaaaaaaaaaaaaaaaaaaaagactactactaagagaatattgatagataatattttatttaaatatgtggcaacaatttgagttaaaactgatgtttccgctctttataggccgagtgatagctactttcacatgttcaggagaaaaggaagtaaatttggctgttcaaaatgcaaaggctgcttttaaaatatggagtcaaaaatctggcatggagcgttgccgaatccttttggaggctgccaggataataagggtatgttccaatttatttccttccagaactcagacattgctctgaggtttctttgtgatgtttgcagttcgactttgttgcaacattaggccgtaacgtttttataaaatggaaaaacatttccacatgctcaccttagtatataaaacaagtttttgttcaatacttcccatctggatgttggctcttggacatctcctttggcaggttttcatgtttgtaaagctttgttttgaattataatgcactctttatagctcatcgtcctttttttatttttattttttttttttttkgagacggaatcttgctctgtcgcccaggctggagtgcagtggagtgatctcrgctcactgcaaccttcgcctcccgggctcaagcaattctcctgcctcagcttcccaagtagctgggactrcaggygtgmgccaccatgcctggctaatttttgtatttttcgtagagatggatttcaccatgttggccaggctggtcttgaactcctgrcctcaagtgatccacccacatcggcctcacaaaatgctgggattacaggcgtgagccactgtgcccagcctttctttctttttaaaccatgtggtttacttgtttcctttttattctttattttgatgattctcaagtctacctttctttttcagatttgttttcagatagggttttaagtatcgttactttaattgggaagatttcatagatttgtagatgttccctttaaaaaaaagagagttaaactttttttttacatcataaatatatacaatttttatttgtcaactaaaaaaaattgtaaaaacaagtatttaatactcatcgcaaaacataaaaagcctgcaatgcaaagggtttctgtggtgtagtrgttaccacgctggcctaacacacggaaggtcctctgtttgaaacttgacggaaacaaaaggtttcttttgtttcccagaatctgaccaggctgcctcttcctgggagtccagagctgcgaggaacaagtgataatcctgcctccttttttttttttttttatacttaagttctagggtacatgtacacaatgtgcaggtttgatacataggtatacaagtgccatgttggtttgctgcacccatcaactcaycatttacattaggtatttctcctaatgctatccctcccccagccccccaccccctacggccccggtgtgtgatgttccccaccctgtgtccargtgatctcattgttcaattcccacctatgaatgagaacatgcagtgtttggttttctgtccttgtgatagtttgctcagaatgatggtttccagcttcatccatgtccctgcaaaggacatgaactcatcctttttaatggctgcatagtattccatggtatatatgtgccacattttcttaatccagtctatcattgatgggcatttgggttggttccaagtctttgctcttgtgaatagtgctgcaataaacataygtgtgcatgtgtctttatagtagcatgatttataatcctttgagtatatacccagtaatgggatggctgggtcaaatggtatttctagttctagatatttgaggaatcgccacactgtcttccacaatggttgaactagtttacagtcccaccaacagtgtaaaagtgttcctatttctccacatcmtctccagcacctgttgtttcctgactttttaatgattgccattctaastggtgtgagatggtatctcattgtgggtttgatttgcatttctctgatggccagtgatgatgagcattttttcatgtgtcttttggctgcataaatgtctttttttgagaagtgtctgttcatatcctttgcccacttgttgatggggttgtttgttttttcttgtaaatttgtttaagttcattgtagattctggatattaaccctctgtcagatgggtagattacaaaaattttctcccattctgtargttgcctgttcactctgatggtagtttcttttgctgtgcagaagctctttagtttacttagatcccatttgtctattttggcttttgttgccattgcttttggtgttttagtcatgaagtccttgcccatgcctgtgtcctgaatggtattgcctaggttttcttctagggtttttatggttttaggtctaacatttaagtctttaatccatcttgaattaatttttgtataaggtgtaaggaagggatccagtttcagctttctacatatggctagccagttttcccagcaccatttattaaatagggaatcctttcctcatttcttgtttttstcaggtttgtcaaagatcagatggttktagatgtgtggtattatttctgagggctccgttctgttccattgttctatatctctrttttggtaccagtaccatgctgttttggttactgtagccttgtagtatagtttgaagtcaggtagcatgatgcctccagctgtgttcttttggcttaggattgwcttggcaatgcgggctcttttttggttccatatgaactttaaagtagttttttccaattctgtgaagaaagtcattggtagcttgatggggatggcattaaatctataaattaccttgggcagtatggccatttttgcgatattgattcttcctatccatgagcatggaatgttctttcatttgtttgtgtcctcttttatttcattgagcagtggtttgtagttctccttgaagaggtccttcacatcccttstaagttggattcctgggtattttattctctttgaagcaattgtgaatgggagttcactcatgatttggctctgtgtttgtctgttattggtgtataggaatgcttgtgatttttgcacattgattttgtatcwtgagactttgctgaagtagcttatcascttaaggagattttgggctgagacartggrgttttctaaatatacaatcatgtcatctgcaaacagggacaatttgacttcctcctaattgaatacactttatttttttctcctgcctgattgccttggccagaacttccaacactatgttgaataggagtggtgagagagggcattcatgtcttgtgccagttttcaaagggaatgcttccagtttttgcccattcagtatgatattggctgtgggtttgtcataaatagctcttattattttgagatatgtcccatcaatacctagtatattgagagtttttagcatgaagggctgttgaaatttgtcgaaggccttttctgcgtctgttgagatagtcgtggtttttgtctttggttctgtttatatgatggattacgtttattgatttgtgtatgttgaaccagccttgcatcccagggatgaagccaacttgatcatggtggataagctttttgatgtgctactggattctgtttgccagtattttattgaggatttttgcatcgatgttcatcagggataytggtctaaaattctctttttttgttatgtcttggtatcaggctgatgctgrcctcataaaatgagttagggaggttccctctttttctaatgattggaatagtttcagaaggaatagtaccagctcatctttgtatctctggtagaattcagggtttttagcttctttgtgatgggttcaaacatcatcctttacctcagagaagtttgttattaccgatcttctgaagcttacttctgtcacttgtctaagtcattctccgtgcagctttgttccattgctggtgaggagctgcgatcctttggaggagaagaggcactctggttttgagaattttcagcttttctgttctggtttctccccatctttgtggttttatctacctttggtttttgatgatgctgacctacatatggggttttggtgtggatgtcctttytgttgatgttgatgctattcctttctgytagttttccttctaatagtcaggaccctcagctgcaggtctgttggagtttgctggaggtccactccagaccctgtttgcctgggtatcaccagcggaggctgtagaacagcaaatattgcagaacagcaaatgttgctgcctgatccttcctctagaagctttgtcccagaagggcacccacctgtatgaggtgtcagtcggcctcgactgggaggtgtctcccagttaggctacttgggggtcagggacccacttgaggwggcagtctgtccattctcagatctcaaactccatgctggaagaaccactactcttttcaaagctgtcagacagggacgtttaagtctgcagaagtttccgctgccttttgttcagctatgccctgccgccagaggtgcagtttacagaggcaggcaggcctccttgagctgtggtgggctccactcggttcgagcttcctggctgctttgtttacctagtcaagcctcaggaatggcagacgcccctcccccagcttcactgccamcttcgcagttccatcttggactgctgttatagcagtgagcaaagctccatgggtgggggacccgccgagccagctgcaggatataatctcctggtgtgccgtttgctaagactgttggaaaagcgcagtattagggtgggagtgtcccgatttcccaggtaccatctrtcacggcttcccttggctaggraagggaattccctgaccccttgtgcttcccaggtgaaccagtcctaatgagatgaacccagtacctctgttggaaatgcagaaatcaccgtcttctgcattgatcacgctgggagatgcagatcrgagctgctcctattcggccatcttgattctggactctgatagttaaactttttatagtcttaaagatcagaagtaccagatgttcattatagaaagaaaattcagaagagaatacatcaaaataagaatcatggatagctgagtggtaggtctgtggtgactttttgtcataagtatgttacgtcagaaactgtgacgggtctgagagtttccctgctttcaagagtgtgtgtgtatatgtgtatatattacatacatatacatataaaacacatataatatacatatacataattatacacatataagctatgttatacacatagaataatatataatctatataatatacatatattctatattatagttgtaaattacacaattatgtgtaatatatgtaaattttttttttttttttttttttttgagacggagtctcgctctgtcgcccaggctggagtgcagtggcgggatctcggctcactgcaagctccrcctcccgggttcacaccattctccygcctcagcctcccaagtagctgggactacaggcgcccgccactacgcccggctaattttttgtatttttagtagagacggggtttcaccgtttttagccgggatggtctygatctcctgacctcgtgatccgcccgcctcggcctcccaaagtgctgggattatacatatatatattctagcaagagacatgaggctttttggatcacagagaaggatggtttattacagcaaaatgcagcagccatagcaataccttagcactagtttctgtttattattattttttttttgtgatggagtctcactctgtcacccaggctggagtrcaatrgcacartcttggctcactrcaacctccdcctcctgggttcaagcgattctcctgcctcagactcctgaatagctgggattacaggcacatgacaccacgcctggctattttttgtatttttagtagagacagagtytccccatgttggccaggctcgtctcraactcctgaccttaggygatccgcctgccttggccttccaaagtgctgggattacaggcatgagccactgcatccggcctagtttttttgttttcaaagcaccggtcaccacggtgagtgaggggatgggatgagaaccaggtgagatccctgtgcatgcaggaagttgcaccaaaggagaagaaccctaaacttctgagattcatttaaatagaaaytactggcacatctgcccatcctcttctctggggagagagtgagagagattgagattacttattaagcaaatctccagggttgagagggaaggtatcactaagtttattatcctggagtataagcacatgtttcaggaacaggaagtaaagargtttacatttctaaatttctccagatttstttatctttagggagatactgtctctgcctttcaaggcctttgctattcaatcaactcgtcagtgtcctttgcttggaaagccctgaccatgcagaaatatcaaaatattcatatagaattttctcccaacgaagtattttccccgttattaaaaatttatttttaattcgataaaccaaagataactcaaagcagataatttattattttcatttgcccattttttttcctgtgaatgagcagcattgtagggctgttaagaattggctcctttattgttaggaaatgacttttattgatcctgggtaatatctaataatattttttgctctgaaatctgttgtctgatactaaatttcatttctttttactttaccctcccctttacttttcctttgatacctgtgtggtgttttattaatcaaaaacccactgcttattattaagtgtttattaatcaaaaacacttgtctgattatcgtgctctgaacctgccttcaccccaatttattccataactgaatagatcccactctgtgaccacacctacaatcatattagccctcaattttcttttaagtgatttttctagttaatcaagatctgcagttctttgttcttttttgacagggtcttgctctgtcryccaggctgragtgcagtggcacaatcatggctcactacagcctcaacctcctgggctcaagggatcctcttgcctcagcttcccgtatatgtgcaccaccatacctggctactttttgtttgtattttttgtagagataggtttacgccatgtttcccaggctggaatttaaaaaaaagtattgctgtaaacaattattttttaaaatattttaagaataaggtaaaatatttcacatttgtccacatatttaccatttctggtgctcataagtcatttgtgtagacccagatatctgtctgctgtcattttctcttctgctagaasgaatttcttcagcatttcttttctgttttgttttgttttttgagacaaggtctcgctctgtctccccagctgaagcacagtagtggaatcatagctcactatggccttgaccttctgggctcaaacgatcctcccacctcagcgtcctgagtagctgggactacagactcatgtcaccacacttggctaatttttgtattttttgtagagagcgggtttattcatgttgcccaggatggtcttgatctcctgggctcaagtcatcctcctgcctcagcttcccaaagtgctgggactgtacgtgtgtgccactgtacccagcctagaattaatttcttttcttttcttttctttctcttttttttttgagaggagtctctctctstcacccaggctgragtacagtggcatgatcwcrgctcactgcaacctcygcctcccrggttcaagtgattytcytgcctcagcctcccgagtagctgggattacaaatgtgygccaccatgcctggctaatttttgtatttttagtagagatggggtttcaccrtgytrrccaggstggtctcaaactgctgacctccagtgatccgcccacctcggcttcccaaagtgctgggattacaggtgtgagccactgcaccccgccaggctagcatttcttatagtgcaggtctgttggtactctttcagattctgtatgtctaaaaaagtctttcttttgcattaatttttgaatgaattgtaggtaaatagttttttctttcagtactttaaagatgttgctccactgtcttctgatttgtattgtttcagaagagaaatttactgtcatttttatttttgtatctttgtatgtaatgtactccctctaccccccacccctggctgttttaatatttttctccttatcactggttttaagcaatttgattatgatgtcttttggtgcagttttcttcatatgtatttttcctgaggtttattgatcytcttggatctgtaaatttgtttcatttggaaaaaaaatttggccatgatttctttagtttttwtttttgccccctcttccatcacttctccttcagggcctccaattacacatatattgggctgcctgaagctatcccacgtcactgatgctcagttcattttccagtttttgggtgtgtttatgggtttttttctccttctgagccttccctcccacccgctgtgtgtgtgtgttttgttttcaggtaatttctattgttatgactcaagttcatcggtcttctatagtgttttatctgctgttaatctcatctagtgtattttcatctctagattaatttgggtcttttatatatgtgttctgtgrctctccttaacatgcttatgtttttctgtgccttcttgaacatacggagtatagctatcataacttaatgttcttgtctactagttctgttgtgttatttctgaatgtgtttttattggttagtttcrcttcctggttaaatgttacggttttctactttttgcatgcctggtagtttttgatcactagacatatgatctctagtgaatcactagggcacattatattgctgggtgctggatagtcttgtactttaaaaaatattcttaagctttgttctgggacacagtgaagttacttggaatcagtttgatccttggaagatttgcttttagatcagcaaatttcgccatgttattcaatacccttctgactgcttaaccctgtgatccgggtgttaatgaggttttctcactatggctggtgggaacatgaactatacctggccctgtgtgagttctggggctttttttttttttaaaaaaaaaccttttcttcttgggtagtccttttcccagtcttgggtagttttctcacactggtactcaaaggggaatctgcagatttctggggttctctatctgtgcagctcttttcccttccacactcagtcttgaagaactgtagccactcaaagttccctaaactcccaccctatcttctcaactcatgtrtctgctgggcgccacctagcttcctcctccctgctctgtggcctgaaaactttctctaggcagtagactccagcaattgtagggctcacctcattggttccctcctccagggaccactgccttgagttgcttaatgtctgatgtctgaaaatggttcatgtattttatctggtgtttttagttgtttaaggtgggagagtgaatctggtccctgttaatccatcttggctagaagctcattgattcctagtggaaatgaacatttttttccatattttctcatttttactttgaatcctttggtacttataccagattgtatagatcttgtctgtgagacccagtcatttttcagttggagaccccttgtgaagtagctatcatttggattaaaagaggagggagaatgttacttaaaacaatgacaaaactatctaaataaagaagagattgtgtatgtaggttatcttcttgcctccagccctggcccaggttggtttgtcttgtacagtgccaccagagtggtcctcctacagaagcacatttgatcatggtacatccttgggtaaaactggccatggtccccctccttaacatggccctcaggccctgtttctccagcctcgtcttttctcttcacacaccataagacccagctctcctgcactactggtccttcctcgtttaccrtgtgtatactgtcacacctcatgcttttacaatgccatgacgctgagtttggtgctattcttttgtttttcttgcctcttgtgcttacatgtttagcatttagtggtctgtactgtaatttatccctccctccctccattttttccttctggacaaggtgattgttgtacataattgtattagcaaaagcatcttgagatgtatatagctattttacctatttgagaaatgagaaaatgctcaaaaaggttaaatagcttgtcttagatcatataactagtaagtataagagctagtctgttgggcttcaaagctagacattaagccctgctgaggggttcaaagtgaaagggagaagtgagggacctactcttggcttctaatctttcatcccagtgaacacctggtcaagtcatattgtaaagcagggtgatatagaggaggaacagggttgggaacaacacatgtatttcctaagaaatacttgtagcagtatgttgttatggtgaacaattttatcttatggttactcttgcaatagtagcaggcagaaatttttgtcagagacatctttgataatccttacgtactatatcagaagatctcctaatgctcttagtagataactttttttttgtaaggatggagaataatagaataacacagaaaaaatttcccaaggccatctaattaactgaattttctctgagagttgaaaccccaaaacagcccccaaaaccacttgcctatccattattttaaaagagaaaaaaatctccagagtaaaagtttctattctcttagtaaatgttccagggcttagcagcgatagaatcacagattacttcctatttgttcactcttacactaaagtgtaagcagaaccgtgtttcactattgccagtgtaatatctcttccctgtatttgaaatgttctgtactgattcatcactttattcaaccgattaatgcactagcctctctagggcctagtttcctcttgaattcaagaaacaaaatttaagctacttatggttgattatacctttggaaaactattttgtgttaattatactcaacaaacttaagaatggggaataatttatgcttggcgtaagaattgatgtatgttttcctcttagggtaccctctttctagggtcagcatactgggaaacaagttaattgtcaaaaggttgttttgttgagtgtagagtcaggaagggagaaggtaaattgttggtttaaaagagagtttaatttagaccaggtttgaatgtgaacagattatcctttctgaaggaaaatgtctattcaaaaatttcaatattgatttaaaatgtgctgacttgcccttttagaagtaagctcttaaagggatagacaggactgatactcttttccctagtaatgaatgtagaatgaatgagtcaaagcactttatacctctggcctttataagaaatacagcatgtccaaatctcactatccaactgtcctttcttgtatttcatattggttttcatattcctactttcatcttttctgagctttgtactgtggatagatgcttgagttagtttctgttgcactccattttgcttctggccagccttactgcttatcagttttataaacagaatgttccttcttgtcagttgcttaatcttttatgtatgttctgatagtcaccctattatttattttaaattggacccataatagcaactgcctacttcttacatattcaattcttttatgttctttagaccaaagaaaggcattatttagctttctttcttaggtctaatttcctaaacctttaagctcatcaccggaccatctattgaatttctttatccttagtaagttgtggagcccagaactagaaacagtatttgaaaatagtattgattgaatgctaagtattagaaaatattagaagagaatatgctgcaattctttgggtgacttaaagtgacgcatattacaacctcttaaatgcaattgtgtgttagaatattttgtataatttccctaagaactgttttctcttaccatatatgagcaaacatacatatttacgtacatgtacgtattacattcattttccaaaatgaattattcttccacttgtgagccatccattttctctccattctctacccctcacctcttcaataaatatacacttcaaatcagaatgggcctgccctgtgactttcagagcctcagagggcatgggttcattcctgccyggtcttgccccttcttttactaactgatcttgaaataaagtagyggtcttaaatctttgtcgattawcgagggaagaacagggctgctgttcagctataagcctttatctctcttctaaatgtaacactgccatttcttttcatttaaagtgaaagctatttytagttttaaaaattgagcagtgtgttctatttaagcattaattacatcaagacatattggaatatgtcttaaatctagtcttctgctttacccaaaggaacgggaggatgaaattgctactatggagtgcatcaacaatggcaagtccatctttgaggcccgcttggacatygacatttcctggcagtgcctggagtattatgcgggcttggctgcatccatggctggtaagtcctcacctggtgtctgtgaccagctgataatgaggcagaagagcagggcctagtggtgaagggcaaagattttggaattaagacaaacctgggtgaaagtcttgggtttgtcactttctacctgggtggcctgggaattactttatctttcctaatctaaactggagataataattcctaccttcttgggttaaggattaaatgagatagtgcatgtaaagcacctagcatgatacctgagctttagaccaaattgctgaaaaaccagttttcayaagaatcggtttgtcatatttaccagttttatctatttagcaaacttttttttgacagtgtataaagttttcaacaattgatattggaaggttggtagggcctaggaaggttgcaaggaacttacatgcttcccctgctgttgagtgttcctctcatttccattttgtttcatctaagctatctaatagaggctcagtaaattcttagagarttgtwaaatcaagttagatgaacatgtgtttgaaggataggcagggttctctatgtggagagaatacrtggaagccagtggaagactgcctggaacaaatagaagaatggagacagggtgagcctggtgtattgggagaagtggggaggctgcgttgactggagtacaagtcagactggtacagatgttggtgaaatcttggggagcacagacctgcatcctsctttactcctgttttccccataggtgaacacatccagctcccaggtggatcgtttggttataccagaagagaaccacttggggtatgtgtgggaataggagcatggaactacccctttcagattgcctcttggaagtcggctccagcattagcctgtggtaagaatgaattatccctccatttgagagccattcgttcattctctcgttcgttctctccccattctctacctttcacctctctataaacacacactttaaatcggaaggggcctgctctgggatattcaaagcctcagaggacatggctcgttcctgccctgtcttgcccctcaaggagcttatagttwaggttgtacacaatcatgtctagatattctcaggttttatttatttaattttgtatatgaaaagaaatttaattttttcttattaaattgaattagatttgtgctacttataagttctcttcctttctggacaagaattttaaggtaggagttagcacttaggagtttgacttcatttacgaagcagaagataaactcytttcttcatttgggtcttaagagaaatgataagcaaggctttgataagcttcttatcaaagaggagctttggctgattgacataaaatagttttcttacagtatttaaagagaagaatctttgaggaaagaagactaattttatcttagaaaaaattgtaatgttaraaagcattactgttaggacattatattgaaatgcagcttttgtcctgttgccattgcatgttcttgttttagcctatttctctttgagatacagctgtgaaagaggaaaaatagtcactagctttaatagtcaccagaattaagtcactagctttggggactctcatcaartgaaccattctggtcttcaatgtcaacttttataaaatggagctaatgatacctacttcatactgctgttgaaagtgttaaatgagataatatatgtgaaaaggcctagatatgcaaatgtgagactgggcaactgtagggtttgggatctgtttaatgagagaaaccaagatgaaaaggacaagagttgtttacttattgatatggtttggctgtgtccccacccaaatctcaacttgaattgtatcacccagaattcccatgtgttgtgggagggacccagggggaggtaattgaatcatgggggctggtctttctcatgctattctcctgatagtgaayaagtctcatgagatctgatgggtttatcaggggtttccgcttttgctgctgcttcatttttctcctgccgccaatgtaagaagtgactttcacctcccgccatgattctgaggcctccctagccatgtggaactgtaaatccaattaagcctctttctgttcccagtttcgggtatgtctttatcagcagcatgaaaacaaactaatatggttattaataacatttttgatgtaggatttggttggggaagaggaaacaattggaatcatttttgaattgtcctctagtcctgttttcaggggatcactggtcttagaaagtctttttatgtttgtgtcttgggtttatgcaggtaatgccatggtctttaaaccttctccctttacacctgtttctgcattgctactggctgaaatctacastgaggctggkgtacctcctgggctcttcaatgtggtgcagggaggggctgccacaggccagtttctgtgtcagcatcccgatgtggccaaagtctccttcactggaagtgtgcccactggcatgaaggtgaggacraaaccagtattggtcaacacacatggcatttggatgtggcaaatccggtcctacccagagtatattttggaggcttctcttttgattttacctagcctgaattgggaatgggaaggagattttattaggcagaggtgtgaaatttcctgtaaaagtatgaagggggaaagggagtacacatggkgtgatttgtgttaggccaggtaggggtggaaattaacagccccagcctaaggagaggatgtgtcttagtggacaggggcctgggctgccacttgtattgtttagtgacttaatttcttgtatagaagaaaggatttttactcaggctatttcagatccattattttgacattaatttgtgttctgaactctgtcagccttaaacacagtaacaataacacaaaagaatttctggctatgacaatcctgtgaattgacaatattttttatttttatttttttgagacagggtctcaccctgttgcccaggctggattatagtggtgtagtcacagcttactgcagccttcaactcctgggctcaggcagtcctcctgcttcagcctcctaagaagctgagactacagtcatgtgccactgtgcctggctaagtttcttatttttctgtagagatagggtcttgctatgttgcccaggctgggacaatattttttaaatgaactccctcttctaatgtcagtgcaactctgtggattctcttcagttttctggaatagaatattttaatagccaaaaggcaaaggatattgacaagaataaggctacaggtcacaaacagttcaagatgattttgtagsttcagggyctagttgacttagcatgcaatataatttgtgttaaagttctgaataccttgtccttgttctgcaagatcatggagatgtcagctaaaggaatcaaacctgttaccttggaacttggaggcaaatctccactcatcatcttctcagactgtgatatgaacaatgctgtaaagggggcrctgatggccaacttcctcacacaaggccaggtatgtacctgtccctggaagaggtgtaaaaggaatctctaccccctcatccaacagtgtgttttaaagctttttgttttacaatactttcagacttacagaaaagttgcacaaatagtacaaagaattcccatgtacctttgaaccagatttctcaaatattaacattttaacagattcactttatcatcttctttatctgcctgtacatacgtaggcatattaagtttttctgaaccttgagagtaaattgtagacataaggcccctaacctctaaatataaagttcctaaaaacaagtgcattcttttacataagcacggtacacttagtaaaattaaaaaattaacattgatatagtactgttactgaatctatagcccttactcaatctatagcccttattcaaattttgccacttgtttgactaatgtcctcatagtaaaatagaacaaaaatggttttttttccggtctaggatccagtcaaggatgatgcattgcctttagttgtcttgtctttaatctcctttagctgagaacagttcttcagttattcttgtctttcaggacrttgacattttgggagaacaggccattcattttgtagaatgttccttagtttgggtctgtctgatgttttctgttagattcatattatgaatttttggcaaaaataccacaaacatgatgtcatatcctactcagtggtgatttaactttgatcacttgctttaaggtaagtcttcactgtaaagttactgttttttactttgtggttaataagatcttgtaggaggtattttgagactatcctgttcctcatcaaactttcatgcagtaaatacttctatcaccactgacgattcttgctgaaaacaatttttattatggggttgcaaatggtgattttccaattccatcatttcttctatatttgttcaccttctactgtaagaaagaacttgcccttcacccctgtttgttttccattcatttatttatatcagtatggacccatggattcttatttcattctatgtgttataatccaatactatcattatttatttattttttatttttatttatttacttacttattttttgagacggagtctagctctgtcccccagacggtagtgcagtggcacgatctcggctcactgcatcctctgcctcccaggtttaagcgattcccccgcctcagcctcctgagtagctgggamtacaggtgccyvycaccaygcccmgctaatttttgtatttttygtagagacagagtttcactgtgttggccaggctggtctcaaactcctgacttcacaatccacccacrttggcctcccaaagtgctgggattacaagtgtgagccactgtacccggcctttattttatttttttattgagacggagtctcactctgtcacccaggctggagtgcrgtgrmayratctcagctcactgcaacctccaccacctgggttcgggttcaagtgattctcctgtttcagcctcccaaatagcrgggactacaggtgtgtgccaccacggctggctaattttttttttttttttttttttgagacrgagtcttgytctgtcgcccaggctggagtrcagtggtgcgatctcggctcactgcaagctctgtctcctgggttcatgccattcttctgcctcagcctcccaagtagctgagactacaggcacccgccaccacgcctggctaattttttgtgtttttagtagagatgaggttttaccatgttagccaggatggtctggatctcctgacctcatgatacacctgccttggcctcccaaagtgctgggattacaggcatgagccattgtacccagcctcattatttattttgatgctaaaataattgcagatggctggtgggaatccctttccgtgaccttttgatatgccctcattattctttgaatacttcattactttctggcatagcaaagtgttccagactcatacttcccctggctgtgctctggaaccagccatttctctgaaggaggcctggttccattattgtttatctgtttattattaatttttgagacagggtcctgctctgttgcccaggccggagtgcagtggtgctttcttggctcactgcaatctcggcccctccaaggtcaaacaatcctcccacctcagtctccagtgtagcacaccaccacattcagctaatttttgtattttttgtagagacggggtttcactgtgttggccaggctggtcttgaactcctgggctcaagtgatccaaatgcctcggcctcccaaagtgctgggattgcaggcatrtgccaccgtgcccggcctgttttttattttttgtaaayttttttttatgatttagaaggactatcttcaaaccagtacaagtatttcataaataatatctgattgttttctaaccagttgagtaatttgttgcacgataagccacctcacatctttcagcaagaaaaatactaagtctgaacagtaaagacattacacaatgagttaggacacaattaaaatctgctttaaatatttttttgggggagaggacaccacacttctctactaaataaagagaaacaattttgcagtccagaggtcttttatttttttatacctatcatgccatgaattcatagggaataggttccagcatctcaggctccttcccgttggttctcacacagtgggattccctgggtggagtaggctggtgcttcagctgaaaccaggtacctttctctttggcttccttctttttctgatcatcttctttcatgcatttcagaagctatcttgggtcttagagcgcttaatgtgctcaatgtgcacgttaattctcttggcaagaattttgcccttaatttgtttacagcagtgccaacaacatgctgggtaacattgtagactcttccagtttttcccaggtaatgcttttgggcattcctttttgaatagtacccgttcgcttgatgtctacagtattgcctttcttatagatttgcatgcacgtggcccaaggaacaactccatkttttctaaaaggcctagagaacatatattgggtaattcttctctttccctgtgtttgtcgttttggtgaattactggaagacggcagtaccaaccaaaagccctggttccatttagtggtaaatggtatttagaaaccaagatctgagtgccaggtgtgcttgttgctactggtgtatcattgcttctaggccctctcagaggccagtgctgggaaatacatgtttgtatatatgtctgtgcacatatctagttctgtatctgtctgtctacataataataagttcatccagatactttaattatagtctaataccacagggttcatttctgccttctccctttccatatttgtatttgttctctgacagtaagaaatttgactcccattatccacaatgtttatctaattgctcatcatagaatacacttagtattctaataatagtagtttcagatttgtaaatccatacctctgtggaaaataaaccttctaattagagctcagaatttttttacagttgtttttatattcagcgtgagagtatagtcagaatactgtgttcaaaagttacttgggtcagttctacctttccttcaccctccttcagtgtggttatgatactcatttaaaataacagattcatttgtttgtgtttgtattcatttgggttttatttcccccatccttgctgattttaaaattttattttgattaggcaaaacacaaacatggttctaaacatcagaattttacaaaaacagatactcagaagtgttactgctccccatcctgtgtactctgtttccagtgcctccttcccacccagttttgtccatctcctgtgggtagccagtctgatttgtttctggtttttgcttcctgtgtttctttttccacaaatgaataggtacttgtatatttcttattcttctttcatacacaaaaggtagcacattagaggtactcttttgtactttgctttctttgctatgtgtgtgtgtggatgaatatacacacacaaagaatacatatagtatagaatatatagaataaatatatagaatattctacataatctgtactatgtatactttatatatatagagagagagagagagagagcactaaaaataattgtgacgtaatgtgaatttattttattattattattttttcgagatggagtctcactctgtagcccaagttggagtgcagtgacacgatcttggttcactgcaaccttcgcccctggagctcaagcgattctcctgcctcaccctcccaagtagctgggactagaggcatgcgctaccacacccrgttaatttttttgtatttttagtagagacrgggtttcaccatgttgyccaggctggtcttgaactcctgagctcaggcgatccacccgcctcagccttccaaagtgtgggattataggcgtgagccaccacgcctggcatgagccaccatgcccagtgtgattttaaatatgtatcacaatttatccgttcatctggcaatggggttatttccttatcttggttattgtgaataatgctgcactgagcatgggagtgcagatatgtctttaagctactgatttcatttcctttggtatatacccagaagaggaattgctgaatcataggatggttctatttttaattttttttttttttttttttgattcggagtctcacttagttgcccaggctggagtgcaatggcrcmatctcagctcactgcaacttccgcctcctgggttcaagtgattttcctgccttagcctcctgagtagctgggattacaggcatgygccaccacgcctgactaattttgtatttttagtagagacggggtttcwccatgttggccaggctggtctcraactcctgacctcaggtgatctgcccacctcggcctcccaaagtgctgggattgcaggcatgagccgctgttccctgccaatttttaattttttaaagagcccctatcctgttttccttcatggctatactaacttagattctttttttttttttttttttttttttagkgaaaggaagtttattaagaaagtaaaggaataaagaatggctactccgtaggcagagctgccccaggggctgctggttgcccctttttgtggttatttcttgatcgtatgctaaacaaggggtgggttattcatgcctcctcattttagaccatatagggtaaaatgacgttgccatggcatttgtaaactgtcatggtgctgatgggtatgtcttttagcatgttgatgcattataattagcatataatgagcagcaatgacgaccagcggtcactcatcaccatcttggttttggtgggtcttagctggcttctttaccacagcttgttttatcagcaaggtctttatgacctgtatcttgtgctgatctcctatcttatcctgtgacttagaatgtctaacttcttgggaatgcagtccagtacgtcycagccttattttacccagcmcctacttaagatgaagttgctctagttcaaacacctgtgacatttcccctctcccttttataaaagaacccttaatcctaagggttgcagagggacaaagatccatcttctgtaaactttttcatgctgaataggggcaatgatattcctgtctaattattagggtctcttgtattcaggatagagaggagctcagtcagaaagcgtcagggtgagggtcgcttataactccgagttccgacaaaaggtgatatccagagttggccaatcagtgctgcagtctatttcttttgggtcgggaggatctcctcagtattgtcccttccatggtttgccagaaagatgttactgcaaaggggccctgatccagaccccaagagagggttcttggatcttgtgcaagaaagaattcaggacaagtccataaagtgaaagtaagtttattaagaaagtaaaggaatraagaatggctactccataggcagagcagcctatactaatttatattctcaccagcrgtataccaagatttccttttctccgcatcctcaccaacacttgttatcttttatctttttgataataaccatgctaacagatatgaagtgatacctcattgtgattttgatttgcattttcctgatgattagtgatgtggagcatcttttcataaacttgttggccatttgtatgtttctggaaatatgtctatccaggtcttttgcccattcgtaatcagaggttttttttttttttttttgcaattgaatagtgtgagttccttatatattgtgatgatttttttgtgtgtatggtaaagcctaatgtaaaatttaccaatttaaccgtgtgtgtgtgtgtgtgtgtgtgtgtgtgtgtgtgtgtgkgtttgtattttttttattttttatttttttattttttggagacaggatcttactctgttgctcaggctggagtacagtgacatcatcccagctcactgcagcctcaacctcccaagctcaagtgatattcccacttcagcctcctgggtagctgggactataggcatgtggcaccatgcctggctaatttttgtattttttgtagagatgagatttcgccatgttgcccatgctggtcttgaactcctgagctcaagcaattctcctgcttcagcctcccaaggtgctggaactacaggcgtgagccaccacacctggcctttttgaaccatttttaagtgtagagttcagtgacatttaatacattcacgttgtgtacaactatcatcattattcatctctagaactttttcatcaccccacattgaaaactgtgtaccccattaaataataactctgtttctctctcccctcagcctctggtaaccactagtctaattcccgtctctatgaatttgactrttctacgtaccttttataaatgcaatcatacaatatttattattttatgtctggctcgtttcacttagtataatatcttcaggttcatccatgttgtagcatgtgtcaaaatttctttcctttttaaggctaaataatattccattgtatgtatgtatacacacacagcacacatacacacacacacagcacacacataccacattttgtttatccatttttttatttgtgaacacttaggtggtttccacttttggctgttgtgaataatgttgctatgaacattgatgtacagatatctatagtagaagtatctgctttcagttcttttgggtatatatccagaagtggaataagtggatcatatgataattcagtgtttaattttttgaggaaccactgtactgtgccctacaatggcagcaccattttacatttctacaagcaatgcacaaagtttccaatttctctacatccttgccaacacatgttattttcttattttcttgctttctctgtttttgataatagtcatcctattgggtatgaagtggtatctcattgtggttttgatttgcatttccctgattattagtgatattgactgcatatgtaattttataagatattgccaaatccctctctaaaaggaaatgttgcattcttttttttttgtttgttagttaagcaattattttattgctcaagtacatagacaaatttatgcaaccagggcagaggctgtatatgattcatatttccagytgggagagaggactcacttggtcttataatatcgagccaaacagtgaatccggctctctatcagaatcagacagaatttagcatcctcatcctttctcttcctctcaagaagcttttgaacagcaactgctgccttaattaaatggtagagatcttcagggagattaggagcggtcccttagacttaagaattcttaagattttattgcctgtcacaaatcgtacttgtgcagcatcatgtgaatctctcaggatcccaccgatttgtgaaggagtcaggcccttcttggccagtttttaaatctgctccttcatgtcgtcagatgtcaacttcagcccctacttcagcaaccccacttcagtggggatgctgcagcgatagagcaaagctgactgagacagacccttcccagaagcgtgcatgtgacccatgatggcagctgtcaggcagcaaaaggaacattcttactaacgatgcatgagtacctatttcttcatagcctttcttaacagcatatatagtcacaattttaaatttttatcagatagatgagaagtggtatttcagtatagttttaatttcagtttgtttgtttgtttatttatttattatctttgagacggagtctcgctctgtcgcccaggctggggtgcaatgggacgatctcggctcactgcaacctccatctcccacgttgaactagttctcccaccttagcctcctatagctgggactataggtgtgcrccaccacacccagccaattttttgtatttttagtagagatgacgtcttgccatgttggccaggttggttttgaactactgacctctagtgatccacctgcctcagcctcccaaggtgctgggattacaggcctgagccactatgcccaaccttgttttacaattatgaatgacattgaacgtctttttcaaaactcacatataataaaattcacatttttggtatgttatattatgagatatgattttccattaattgttaagagttttttaaaattagtgatgatagccttttatctgaggtaaatgttgcaaataattttattccaattttttaatggtcttggcttagtttaaggtatttgccatgcataaaatttttatttttctatagtcaaatttatcaattttttttctttaattgtgtctagattttgggtaatagaaaacctttttctacacctaggttttagaggaattaccagtattgtctctttttttwaaaaaaaaaaagtctcgctctctcatgcaggctggagtgcagtgacrcagtcagggttcactgtgtgtatccttgacctcttaggctcaagtgaccctcccaccttagcctcccaagtagctgggactacaggtgcgtgtcaccacacccaactaatttttatgttttttgtagagatggggtttcatcatgttgccccagctgattttggactcctgagctcaagtgatccgcccaccttgtcctcccaaagtgctgggattacagatgtgagccactgcgccctgatttcttattttatattttgattcctgatacatttggagtttatttttatatgtgatgtaagatatgtatcttattttatgttttccacattactgatgatttgttctagcaccatttatttagttcatctctgtcctaatagtttagctttcacttttatcatagactagatttccatgagcacttggctgtgtttttggacttttctgttctgtgttcttacagcatttgaacagtttttatgttcctttctataggagggtctaaatagtgattattagtgatttcagagacaaattttttaacaattagatttaagaccacagttcttgatataggtttactgttaagttcccttccattcttaaaatatacagccagattgagccctgatatgaggaagtaggagaggtgctgtgggttatatggatctagtaatggcctttaaaaaatttaaacaagcaaaataagaactaacttttacctcaaagggcagattttgcttgtggagtggtatgtccacaattacgtgtgtgatccttcttattcagtatggagacaatttttagaaatggaaatatccttttaaaaaatgtatagtgtctcttttcagtttaaagtttttagattgtgttcatttttccttttcccttttttctccttacacacatagaaattgatgtcttgtgtttgtcctttaggtttgctgtaatggcacaagagtatttgtgcagaaagaaattcttgataaatttacagaggaagtggtgaaacagacccaaaggattaaaattggagatccccttctggaagatacaaggatgggtccactcatcaaccgaccacacctggagcgagtccttgggtttgtcaaagtggcaaaggagcaggtaagaaataattggcagtagggtggggttggggaagattatactactcctaaatcacatgctttgtgcccttttcatgttaatattcgtatgactattattcattggactattagcatccctggctgtgttctgcttkgtacctgcactgggaagactatgtgtttgttcgggatacaattaacatttcaggaatgcattttggggttatatttttaatacaacatatcttttttccttttcggcagggtgctaaagtgttatgtggtggagatatatatgtacctgaagatcccaaattaaaggatggatattacatgagaccttgtgtattaagtatgtcctctttttgtttgcttttagatgatttgaattaaatactgaatagatagagatgaatatttataaaatatgtacatgatataaagcaagggctggcaaattatgtggtcctactacccaagtttaagaagtagaactgctccattatctttgaagccttctgtgtgcccctcctttagggcacccatatgtattagtttatccaggaccacaactattgttctggaagcaaggagctcaaaaatatgaaagtgcatatttgattaaaaaaattaataaatttaattccttgagaaaataaagaatgtttttcatgtgacctgtagatcattgtattagacattttgcattgctatgaaggaatatctaagactgggtaagtagaaaagatgtttatttggctcatggttctgcagactgtacaggaagcatggcaccatcatctcctcctgttgaggcctcaggaagatttcagtcatggtggaaggtgaaaggggagcagacgagtcacatggtgaaagagagagcaagagaggcrccaggctcttttaaacagccagctctgtgtgaactcacagagtgagaatgcactcattaccatggggaggacatcaarccgttcatgagggatttgccccgtgacccaaacacctcccactaggctctacctccaacaatggggatcatacttcaacatgagatttggaggagaaargcatccagaccatatcagtcatcaatataataaaaccagtatgtcagataatatactaatctttttagaaattacataatttaataatttttagcacctccattcagtcttaaaaatctagttttgacagtcaaggtgtatatgggcatcctactcccacccatctacttccctcctacttcagaggtaactactattctcagtgttgtttttatcattcttatgcttttctctatcattttatagtgtatgttagtatcccctacaaaaatgttgatagttttgtaggctttaaacaattatatgtaggttgaaccatgttgtataattccttacatcttatttggagataaattaagctggtttttgcccctaaggttaatagtggtgtcagtttttaacaacttcatatttgatgcagtatataacctttaatcctcactagaaagaaccattgacatttaaaagctgaaaacctaatgtccatcccccatgaattaggttgcagttattacatgaatatttaataaataggaaaagcttacaatacattgttaaattaaaaatattggggctaggtgcagtggaacacccccagcactttgggaggctgaggcaggaggatcgctggagcccaggtgtttgagaccagactgggcaacatagtgagacccratcttcaaaaaattagcygggggtggtggtgcacactgtggtcccagctgctcaggaggttttattttaatgtttgcagctaattgcagagacgacatgacctgtgtgaaggaagagatctttgggcctgttatgtccattttatcatttgacactgaagctgaggttctagaaagagccaatgataccacttttggactagcagctggcgtctttaccaggtatgtggagtgggacactgagagcagttttgaaggagcggggctgcagtatctgcttagatatttaattgatcctattctctcactttagtttgccctcataggagccatcagcactttctgtttgcttcaggttaagtcagaagacaccaaagcagcattttgcagtttgctgtaaatggccagagaaccctgctattgagttttaaattgagctcgtttaataaacacttaagattctgatctatgtaaagcattgggttagatgtcttttgaaaacacacatgtcaaggaatttagaaacctgtaagtatataaattgtgggcagtattcttcaaaaacatgatttttagtggcattatagtagttcctaattggaatgcattataactcatgtagccattttttctgtggttggatatttgggatattgtttctattttaaatattatagtaatatgattaatatctttgtgcataaactttactattacaagtaaaaatgatttgggagtacaatttctttgaaaccaattgcagattgcttggttttatacaaactttgattagtctttggcagtagaaggcagtttgctaaagcggctttacacttgggattatgctgtttctttggtgatacataaagttcacatttttttttttataacttcatggtcaagagcttgggaagaaagcccaagtctcacttgaggacctgatgtaattgcttctctttgagctccgaagaaaagattgaggagctgctcttttgatttggggagtgagcaggttaagtgctcttactttactttgccaccctcgtacagacaaagtccggttacaaaggcgggtaactccaatgtgctattctttttttcttaccagctttactgggataatgcacatactgtacaattcacccacttaaagtgtacaattcagtggttttagtttattcatggagttgtgcaaccatcaccataatctatttttaggacactttcatcatctcaagaagaaaccttgtgcccattaactgttgctcttcattcccactccccacccccagcccctggcatccactaaactactttctatctccatggatttgcccattctgaacattttatataaatggaatcatacagtatatattcttttgtgactggcttctttcacttagcataatgttttcaaggttcatttgtgttgtggcatttatcagtactttattcccaaataatattccgtggtatggatatgtaccactttttgttcgtccattcatctgttacaggcatttgggttgttttcatttttggctattatgaataatgatgctatgaacatatgtgtacaggcctttgtgtggacatatattttcgtttctgttgggtgtatatctagtagtgaattgctgggtaacatggtaactttatgtttaactttttgaggaactgctaaactcttccaaattcgcagcaccattttacattcctccgaacaacgtatgaaggttctaatttgtccacatcctcaccagcccttgttattgtctgtccttctggttttagccatccttgtgggtgtgaagtagtatctcattgtggtttttatttgcatttctgtgggttttcttttcactttcttgatagtcttatttgtagcacaaaattttaaattttgaccaattctaattctgttttttttatctgttacttttggtgtcatagtctaagaaatctttccctgacccacggtcatgaagatttattcctctgttttcttcaaagagttttatagttctcagtctgacatttttaggtctgtgatgcgtttaagttaatttttgtgtatggtgtaagaaagggctccacctttattttttgcatgtagatatccacttgtttcagcaccatttgttaaaaagactgtttttcctccattgaattttggtacccttattgctgttacttattttaaagataccatgtgcatgggactataaaacccaatccatatctgttttgcctggatgataaaagattttaraacattttgaagaaatgagaatttagtaagatttgagaaccctagaactggcagtgtaacttttcctsttaaagtagtagcctaagaaactctcaataatgcacacattttttttttcttcatagggacatccaacgggctcatagagtggtagctgagcttcaggctgggacgtgcttcattaacaactataacgtcagcccagtggagttgccctttggtggatataagaagtcaggtgaggagctgggaggtgtgaatgcaaactaggtctctagagctaggtygtaattcagaccttataaaccagtattcctaaacctgtctgcatatctgaattacctggggaaatacaggttcctggtccttccccagatccactgtagcagtctctgggaatggaagtcaagcatcttcccctacccaacactccctaaatctttctggagggttctgatgtatagcctggcttgtgaactgctgatagatatctcaaaaaggtttatcttgtgggtagaatactttttcttcacagcctgtgacttctgtaagcataaaatcactcccttaggggttctgtatcagggatgtccatcatcatccactgtggagtttttagattccatttaggtaaagtgtctttcaagtaatagctcagtaactttgtttcctctgttatgtcaaattaacaaaatctttaaatttatcattaagcaatcaattataatcgttttcattacccttgatggcatataggagtgtgtttccttagccactgctcattcatttcattcattttatagtcagacatatgttaccacaacatataaatttgtaagtctggtatatcaggagaaggtttgaggcatcaggagtatagccagaaccttgaggttctttctttggagtttgttgcctgtaaatattcatttacatatttctcatgctgttcttctagagtgaaaattggtttggactttgtcgaggcaccattctaagagtctgacctctagtttctgtggcaaatatttacagccatcacagtgttggcaaatatataaactctgatgaacactgatgagatggtgggtgttaatttgacagtcttatttgtcccggtggggtactcagaggagtcgtacacacagrcacaagtgcaggtgggaaccaaggtgccatcttattaacatgtaacatataacattacatgttaagtttctgatagtccctcagtgcagggaattatttgtttggaatcagcagcttaggcctttggagggcctcctaactttccctttcctttggaccagaccatgctatgtggaatgagagagcgagaaagatggccagacgtgcagagcaacacctggcctaacaggcctgaccagctgtgtgcttaggggatttggaaaggaacaaaagacagagtgaggttttcccaggacctttgtgtgtgataccatttgagtggtgctccctggaaatgcacatatttgggacctcggccttgcccttggaaggcagagcctacctaagtctagcacagggtgtacaggcagggccaagggtgggatactacccttttagcacagtaacctcacccactagtaattgggcagtgtcttgaactctgagtaatcagagggaccttcagtgacccctcaccaacatgagtgggtaggttaagttactaggttgctcttataggtgtttaagaaatggtgaataagcctattgtgtaaagttttaaattagcatcagctttcaagggtgtcaggttgattattgtagagattgcctttaacacttgatataaaatccaagcatttttcagacctcaacccagaatagtagatacctgaaattaagattcctattggtgagaaacaagatctgtatatttccctatccctatccccaaatgccagtgggtcattttccccatgcctagctccattcacagctaatatgtggattgaggctttattccaaaacatttaggttctatattcttccctagccctgattagcagtgctcatctttgaagatcattgtgacttttcagactattgtagtgatggctcaacctgaccccttctcctcctttcaggatttggcagagagaacggccgtgtgacaatcgaatattattcacagctgaagactgtgtgtgtggagatgggtgatgtggaatctgctttttgaaaacctgcagtgaaacctattgacatggccacgctgtggaatgatgtgaattggccctgtttacagaggcagtacaactgaatgttattttacatccagaattttggcgttcagtataagagaatggttcatgttactctttctctctccatcagcttcctcactgaaaatgtgcattaagtgccttgtagatactaatcaagaaagctgtgattctcctcaaagcgtatttttgtgaaatcttttaagagccagtaacatacttctagagaacaggaaaagagactaggataatacatcttccacacatttggcccactgataatgttaattctctggcgtatttcaaagaacttgttcctggctgatccaagtgcagtggtatttacaactaattgatcacaaccagtttgtagatttctttgttccttctccattcccactgcttcacttgcctagtcttgaagaaaaaaaacaaaaaacaaaaaaaaaccttgttcctttataggttcctggtagaatcagtagagatgatttcagctcattgacatttttttaagctrtatccccttgtcattccattgagaaagctgacaactgggatagggaggggattmgataatagatggggtcaaattctgtgtgaatgtgaacttgcctagtaagcactttgtctctgttcactactgcgatagaggaaatctatctccctatcttgggtccttgaactacagcctgctgtcttacaccagtggagctaccctttaaatgtacaaattayttgtatgctaatgtaatatggtgaaattaaaataaatcacactgttaattgttttcctatcgtgttttgaaactaaacgtatcttgaggttatgggaggacagaggatagggctgatgttagaagcacaaagcagggggatttgatcttgtagtaagaacaaaagaacaggtttggttgcagtgatgaactttatggtccaggtaagcatttaggctccatgttcattctcacccggataagcagtgcctgtccctgaagagttgtcaggtcactgtggcttttcagactattgcagtcatgcctcactctgcctccttctcttcctttcaggagaagagtttataaatcatagctaatttagtagtcagagataagggatgcttgttgtcactgggcctggatctaattatgtattatgatgagcaagtactgtagttttagagcataagaacaaccaaatcagcctttcttggtatttctttgcacagaggacacatatgtgatactggacaaagccaatagcgttaccctgtgtccaaggggatcctatgcaccttaagcagtaggagctgcctgggagaagataagtttctgatagtccctctaaagcaagcttgtccaatccgcagcccacagtccatatgcagcccaggacagctttgaatgcagccaaacacaaatttgtaaactttcttaaaacgtgggtttttttttttttttggcaatatttttttcttttagctcatcgactgtcgttaatgttagtgtattttatgtgtggcccaagacaattcttcttcttccagcgtggcccagggaagccaaacgattggacacctctgcaagagaaaacagcaggggaaagggaagcaacatttaagtactcactgttcctactgctacattccttctcatttaatacactaagcctaagaaagggattatctctgattttcaaatgaagaaacagatttggagacatcttggtcccaggcaagtgtgatattttgtgcctatatataaaattatatatcttttcatccatggttcctggctcataagtcccttggtacggttttttgttacaatgttggggcactttaggcctcagaaaacagaatgtccctctctgcccttctgccctcctttttacctgcccaaggctgggctctaatcttccaccacttttctgattatgggtcataagaccttcatttcagaaggggtcctgcctgctgccctgcaggaaaaatgccgcacaagccaggaatctgaagacccttgctgggtttccccgctcagcctcctttgtattagatcatacccctttagtccagtcacatttctacatggtgtctgtgcttcagtcatgcctctctaatgaagtctaagaggcccaagaggacgggcttcagggagctcctggagagctgaacatgtggaggtttataggagggtgaataagaacatgtgcatgtgccaggaaggtggtgcaccccaactccacgggaacagaggctcctgtgcttgggacccttgcagacctggccgtatgtatcccttcatttagttgtttatttgtgtcctttaaaatactctttttttttcccccagaaacagggtctcactccatcatctggggtctcgctctgtcatgtcactgaactaaagtagagtggtgtgatcatagctcactgcagcctcgaccttcctgggttcgagtgaacctcccacctctcagcctccccagtagctgggactacaggcatgtgccaccaggcctagctaatttttgtgttttctgtagagaaagggtttcaccattttgcccaggctggtcttgaactcctgggctcaagtgatcctccaacctcagcctcccaaagcactgggattacaggcatgagccactgcacctggcctaggatattctttttaataaactagtaaatgcatgtctcagttctgtgagtcactgtagcgaattaaccgaccctcaacttgaagccagttgatcaagttccagaagcctggacttgcagttggttggggtcacgggcagtcttgtgggactgagccctcaacctgtgggatctgatgctatctccaggtagatagtgtcagaattgaactggaggatgcccagctggtgtccactgcagaactgatttgcctgcttggtgtgtgaacagaaaactccaacatttggtcacagaagtcttctgtgttgattgttgtatgagagcagaggaaaaacagtttgtcttccacatcagcaagtctataagttgactggcaacttcaagccaggtgtgagtctccaattcctgtgctttctgctaccctctctgtttcctggaactgaacccagtatattagtttcctatgcttgctgtaacaaattaccaccaacttagcagcttaaaacaacacaaacttattatcttacagttctggaagtcagaagtcccaaaatggtttcacttggccaaaaccaagaagttgtcagggccacactccttgaagaggctgtaggagagaatccttttccagcttctagagcggcattccttgcattcttttgctcgtgtccccttcctcttagatgccagcagcttagcatcttcagaatctctccctgccctgctgccttcttctctgtgtagtcaaacttccctttgcctccctcttagaagaacacttaaaggacatttagggcccacacctataatctcagcagtttgggaggccaaggtgggagaattgcttgaggctaggagtttgagaccagcctgggcaacatagtaagaccccatctctacaaataaaaaaaaaggagtgtggcggcccacgtgtagtcccagctactcgggaggctgaggcaggaggaacacttgagcccaggagtttgagttgcagtgagctaggatcatgccactgcactcagcttgggcaacagggtgagaccttgtctccaaaaacagaaatgaagactctcaattccctcctcagacctatgaatctgaatctgcattttaataagatcctcaggtgactcataagcacaagagtctctcaagcactgcttttacagcaatggttctccactttcactgcacattagaattgcccagtgagagctttaaaaataccaagattctcatttaattgatctgggcatctggatttttttttttgagatggagtttctctcttttccctcttgttgcccaggctggagtgcaatggcacattsgcggctcactgcaacctccgcctcctggattcaagcgattttcctgtctcagcctcccgagtagctgggattacaggcatgcgcccccacacccagctaattttgtatattttgtatttttagtagagacaaggtttttctatgttcgtcaggctggtctggaactcctgacctcaggtgatccacctgcctcagcctcccaaagtgctgagattacaggcatgaaccaccgcacccggcctggactcctaaaaggcacccagatgagcttaacagacagccaaggttgaaaactgctgctttaagagctgtgctatccaagtatagtagccttagccatatgtatgtacttacatttaaattaattaaaaattcaactcatcagttgctgtagccacattcagctcagccacacatgggtaggggttatactttattggacagtgcagacagaatatttccatcatgtcagaaggttctgttggatagtgctgcttaagagggaaggaactgagactactcagttttttattaagttaggagagcacctttggaggcgagtgctattagggatgaaatagaaagctgggcaaactctgtgggtccttagaacataaagaagataacccggttgctgacttttgctgaacaagctacatcagcagttggctctcgtgcttcctaccacaatttgtgtggctacaagacccctggtaggcactgtgcatgcattattgtttgatcctcatgaactttatatgataaaagtattttcatattcccaacttacagctgtgtaagctgaggcttagggaggctaataagcttgcccaagggcacacaggcacctgaaggtgggaatacttaaggttcactatggatcaattaggcatttataggctggtatggctgtctgattttcatctagcaaaattcagaatgtgtttcccttatacaaataaatggactctttggaatgtacactgccaacagattagtattaaatagttaatggtagaaacacttatgccaagtttttctccacaagacaagggactagcttgtaagagttattctctaagcagtctttaccaactggttctgccaagccctagggttccctggaagtgcagtgagtggggaagtagggcactgaaaggcagagctctcggttctgcacttcaaccacagcgccctttatgtaccgagcttccttacaaaactccatctgaacccagtgcgcaatagcaaaatgacaaactgggatcacattacggacgctcaacttatgatggggctacatcctgagaaacccagcacacgttgaaaatattgtaagttgaaattgcatttcatacacctaacctactgaacatcatagcttagcctagtgaccttaaacatgctccgaacacttacattagctgacagttgagcaaaaccatctgacacaaagcctcttttataatgaagtgttgaatatctcatatgacttattgaatactgaaagtcaaaaacagaatgattgtattggtactcaaagtacgatttctactgaatgaatattgcttttttttttttttttttttttgagacagtcttgctctgtcactcacactggagtgcagtggtgtgatctcggctcactacatgttccgcctcctgggttcaagcgattcccctgactcagcctcccaagtagctgggattacaggcatgcaccaccatacccagctaatttttgtatctttagtagagatggggtttcatcattttggccaggttagtctcgaactcctgacctcaggtgatctgcccgcctcagcctcccaaagagctgggattacagccatgagccaccatgcccagcctgagtcttgcttttgcaccatcgtaatgttgaaaaattgttaagttgaactgtcataagttggggaccatctgtagtttgaaaagtacaccctgttaagacttttaaaggtgaaaagccagcttcatctccaggtcttccctgccctgcttcactgatgcctgctgttctctgcagtgagaaaggaaacctcggcaagttctctggcctctctagatgtgtttcttatgaagcaaaaaccaaaaccctgtcttattgtaaattctcaattatatcattttttcaagccaggaccaaaaatccctaccattcatcgtcaccatcatttcataaagaacattttaatgtaaaaagtacaagtcaaagctttatgaaaaacagtccctcattttccttattttgctctccactggtgaaactttctcatgaactaacactggagtgtgtgctaaactggtccagcctcctcatcaaatgccccaagggctccaggtggccatttggccaaggctgaccatcttcaatggctggccatggcattctatccttaaatgcttcatcttcggagcttaagcaataaactggtacaatggaaaatgcatggattttagagtcaggactgggttcaaatactgtctctcatcctcacaggctattgagcatttgaaaaatgggtagtgcaactgaagaactgcttttttatttaaattaatttaaatttagatggccacatgtggccaattgggcagcgcaggtctagacactatatttcctattaaggtagtttatggccacatcagtgttttggagtaactatctcattctgccaacttggcagtgttctctaaaccaactgaaatcttctaagtcttcctcatttgtacgtaggcaatcagatctttgtttctaaatgtagcaagttaca

SEQ ID NO: 94984 - DNA, 30344 bp, Homo sapiens
atcattccatattatatatcatagcatcactttgtacaccgtaagtataggcacttataatttgtcaatattcaatagtataaataaaaattttaaaaaactttctgaccatcacaatatccaagagaaataaaaatatatgtcctaccagaaacttgtagataaatattcatagcagcattattcataataactaaaaagtgaaaacaacccactctccatcccctgatgaatggataaacaaaatgtgttttatccaaacactggaatattattcagccataaaagacataaactattgatacttactctaacataatgaagcttgaaaacatgataatattttaaagaaggcagacataaaaggccacatattgtatgattctatttatatgaaacatccagaataaggaaatccataaagacagaaagtatattagtgattgccaaggatttgggggaggaataaatggggagtagactgctcctgggtatgggcttttttggggggtgatgaaaatattctggaattagacagtggtgatggttgcataagtgtgtgagtacattagaaagcactgaattgaacccgttaaaagggaaaactttatagtatgtgaattacttctcaacaaagcagttattttaaaaataaaattttctgcaatatctccaaaatttatataacaaaagaagcaaggtgaagatagtatgtatagtaccatgtgtgtaaaactagatagacagatatagatagatcgtctatagataaatatagataggttatatatatagagagagagagggcaaccagcttttcattctgtacccttttatgtttttcattgtttgtactatgtgcaggtattgtatctattatatatatatttttttctaggatcatatagctaatggtttatcattataacttttcacattcatcctttctttccttttaggaaacaacaattagtgacatccttgaatccgaagtagtgaatgaaatattgcctttatcaaactccaggttagtaaagtcaagacaaataaagtcaagtctatctgagatggactgtcagccatgcctgagagtcatggctgcctaactagtcctggattgctggcttgagaaggcatagctttctggggtcattttctctacatgaattatttgaatcttcttccaattcctccccttgccactccttcaactctaaaccccacagaatcctgacttaaggtaggaaataaaatatgaacataggtttaaggtaaattttatttggctttgtgtaacagttgcaaaaaattgaaattctatcaatgcctgtatccctgtaaccccgaactgctaccaacaaactctatgtacatgatgtcctcacatatggcatttcttagtttttcaggaaaaggtttggtagagtcatttgcaagtcttcaagagactgaagagatcaagtcaaaagaagcaatggcaagttcaaagtcccctgaaaagtctcctgagaatcttgtgtgttcacagaattctgaggctggatacataaatgtggcttctctgaaggagacacatggtatacaagaacaagaccaaaagtcagaactataaaatcactggtgcctaaagctatactgaacaaaagtggtaatttaaagcctggacaaaaggtggaccatgacattgagaagagttaccacagatcccaaatggatatcacccaagagtcttcaaaactgctgataaattcattaaagcagttgtaaaaatggatttctcaagtttgtttgatatcctcagatgccttgtattgaccaaaatattgactttagttcaatgatttatttaggtttctcttcagcagagcacatgtagggttaattcaacattctttcccattatcatgggtatcttttctgatttattttttaacagtaaaaacaatacagtcacattaaagcaaattttgtttttaaaaaaaccctcctatgctgggcgtggtggctcacgcctataatcccagcactttgggaggctgaggtgggtggatcacgaggtcaggagatcgagaccatcctggctaacacggtgaaaccctgtctctactaaaaatacaaaaaaattaaccgagtgtggtggcgggtgcctgtagtcccagctacttacaaggctgaggcatgagaatggcgtgaacctgcgatagcaccactgcactccagcctgggtgacagagtgagacttcgactcaaaataagcagaatacacgtacaaaaaccctcctataataccataagctttttttttttttttgagacggagtctcttactctgtcacccaggctgaattgcagtggcatgatctccgctcactgcaacctctgcctcccaggttcaaccaattctcctgcctcagcctcccaagtagctgggattataggtgcccgccaccatgcccagctaatttttgtatttttagtagagacaaggtttcaccatgttggccatgctggtcttgaactcctgacctcaggtgatccacccacctcagcctcccaaagtgctgggattacaccaataccacagtcttaacacaactaattttattttacagttattcccttttggtcctaattcaagtacatatattctaagtggttattataatattgtatattcattttcacagtttgatttttaatttactgtatataccatggaaacattttcaatcgccatatgatattcaatcatgttgatgttctataattatttttatgggaaaagttttaaatgtttaatgaagaagatttagagcaatacattatttaaaagtggataggaggttgggcgtggtggcttacacctgtgatcccagcactttgggaggccgaggtgggcagatcacctgaggtcaggagttcgagaccagcttggccaacttagggaaaccccgtctctaacaaaaatacaaaaacaattagccaggtgtggtagtgcgcgcgcctgtagtcccagctactggggaggctgaggcaggagaatcacttgaacccgagaggcagaggttgcagtgagccgagactgcaccagtgcactccagcctgggtgacagagcaagactccatctcgaaaaaataaataaaataaaataaaataaaagtggataggaaaataccaagagcttttcctgggggagggggtatgagaagagagttcacataaaccccattacacagaaactacccctaaatatttccaaacaggagtacaaagtaggtgaacagtctccagctcatctttagtgtagtgggactgcttcttcagaaaagatcagcaacattcacatccatttcatctatcagggtggaacagtactgctcagtatctctgaggatgtggatgttctataaattaaacgttctcttgtttggcatttaagctgtttttacttttttttttttttttttttttttgagacagggtctcactttgtaacccaggctggagtgcagtggtttgattactgctcatgcagcctcaacctcccatgcttaagtgatcctctctcctcagcctctcccaagtacaggcatgtgctaccatgcctggctcatttttgtactttttgtaaagacgaggtctcactctcactctattgttcaagctggtctcaaatttctgggctcaagtgatcctcccacctaagcctcctaggtgataggattataggatgagcctctatgccaggcctggttttactttgttactatttaagattatgctgtgttgaaggtctttgtgcatgtagttcttttcttcttttgaattactccagaaaacaaattcgcaagattggactgagtcaaaggatataaatgttaatattgctctaggacatcacttcctttgctttaaaaaagggttctgcctgaccaggtgcggtggctcacgcctataatcccagcattttgggaggccgaggcaggtggatcacttgaggccaggagttcaagaccagccaggccaacatggcaaagccctgtctctactaaaaatacaaaaattagccgggtatggtggtgcacacctgtagtccctgctatgcgggaggctgaggctcgagaatcacctgaacccaagaggtagaagtttcagtgagctgagaccactccactgtactccagcctgggcaaaaagtgagactctgtctcaaaaaataataataataaatacataaataataaaataaataaaaagtgtgtcaacatactgttttcatagtcaagttactcaacctccttgagcctcaatttcttgattcctaaaatgggaacaataatagttctctatcccatagggttgtgaggaccaaatgaaatgaagcatgtaaagtatttagcacgtagtaactgcttaataaatgctatcatcatttattttcactagaggtttatcaatgtactatttttttcacaacctcatcaacattggatattatcaattttaaagatttattctaaaacagttggtataaaattatactgaagcgtgactgctgctgttccttttccccctcctcccctttcttctttttcagttggaggagaccaagaggagaggatcagtaaccagaaataaaaatgaccctttacattgagacacactgtatttttatatgtaatccttgctttctcagacaacagagctagaaagatgatcataggaactaggaaataataactattttattaaatgcatgctgttatattgaatgagccttgcccaaggtccccttctttcactaaattcattgcatctattatttattgaatacctactatatgctattcagtaggcgacattgcagctacagctgcgaataggaccaggagagtctctactttcatggagtttatatgctatcagggaggaagattatgtgtgtgtggcaggaaatgaggtgtagacacataccatacgaagataatgtggaagtgggggtggcatgaagaaaacaaaccagtgatctgaatgaccaagggctactttagattaggtctaatgttgcctctcaggaggtaacatctggggtgagccctgaactacaaggagcattacttcccacacgcataccccaaccaacccccacaatcccccgccaacccacattaagttctggaaggaatatttcagacagaagtaacagctattacaaagccctaaagagaggagggatctcagtgacctggaggaacagacaggtcagagcacagtaactaagggcaagtggtacaagatgaggtcaggtacgtgatagccagataaatgcactgtagggcttcgtatgcacggaattggattttattctaaatatgggaagccaggagttatttttaaaataaataggaagcacaagagttattttaaaaataaaaaataaaaaactctagttgctttatgggaaatgaattggaaatgacaaaactggtagcttttgtggcagaacaaacattatctattgtcctgacttagaggaagggatatttacttagcaagcctgtacgtgccaagctgttctaaacgctgaggatgaacaaaccagagttcctgccttcacggtgttcacactagcgggcagaagacagacagcacgtgtggcggtgcagagggcttggctgcaagagccgataaggaggaccctggcgactgcctagtccaaaagtcctagctagagcaagatcaacttgtactgcccttagtacagcyacgtgagtggggtgaccattgaccttaaccaaaaagatgtcaaggctttcctcctcctcactcccgcgtccccagtgccaggcagagtctctcagctagaccctagcagtctcagcacacaccgcacggggcgacagcttccgggggcggagcctggtctcgctccacgtctaccgcgcctgctccccggacgaaatccgcggaccgggctttaggttcgccggaatcccacgctcccgacttctgcttccgggtcggagccatggcggtggcaaattcaagtcctgttaaccccgtggtgttctttgatgtcagtattggcggtcaggtgagatccaggaggctgcccacacctgcgccgaagrgaaactgctcggggctaggcaggcagaactcacccagagagagcggactcgggaagccagccagaaagtgaaattgcacccgaacctaccgacctgccgggcggggggaaaggaggaggaggagtctccccaatcctagcgccccgcttctggaggaactgggcggttagactagggaggcggaggtgggagataccgagcggcagggtggtgggtcagcccatcatgccccctgctccgtgaagccctcatgrtcttggactgggccttctgacactctcccgctgattgcaggaagttggccgcatgaagatcgagctctttgcagacgttgtgcctaagacggccgagaactttaggtaaggacgtgctccagctccgctggattagctgaggcagaagtcgrgctccagtcagccgcctgaaatagcctgtctacctctgtccgtccgctcactgctcttgagacctgattcctccrtgcattgytctgtctggttgccgtttggattgttcccgtgttaatttacgttgttagtctgtgtgactgcgtgtctggacgtctggctggccgattggtggacttgctggctccagtgtttattctttcccgtatttagaggcgctcacgactgtgayatcatagtgattgaatcattcattttttgtccctttcaggcagttctgcaccggagaattcaggtcagtttcagatgtgtttgacttctttgcctgctccagaggggtgttctggggctgcagtgagggtatcggtgaaccacctgctggccttgaatgattgctggygacagtgatagaaggtaatgccccaagggtctgtccctagtttatttgccttctttatgtctgtcaaccatctttaggagagtccttttggctccagtgcatggtaaactggaaaggccttgtgctacctgctgtcactccaagtctctttcttttyggttataggaaagatggggttccaataggatacaaaggaagcaccttccacaggtaaggctcttggcaagccatcctggagtctttcagaaatatttcctgggggattaggctctttagaggaaaataaaaccagagggtaattcttacatttcttgagaagaaatgtttttgtggactcaacaactgaagatttattaaatgttctaactctacttacactcccccacttcttaggtctttaaaacagaaactactcatctttacaatatcttgtctttttcatgcacttgtttgtgcgaatgcagattttttaaaaagtacacttgtaatcctaaagtgcatataatatatcctgctggttgatatttataactaattcctaaaatgatcatatatgattgtccaaggataatcatatttcctggggagtggagtatgtcaacacttagtctcatttcaatatagaatctttctcatggcctcactgtggttagtaacaatgttagcacataattatatcacagctttagagctttgggtctctaatccccagtaagactcctgtgaagtggtatgggtgatctgcattctacagaggaggaaactgaggataagaaaggttaaggaccctccctaggggtaatagctaacagttgttaagcccttacatgtttagcagtacatttcacataaattctctgtagttctttcccccaaatttacatcaaacccttgctctgccttttgctttggcaagtaagctttcagccccttcttcttattactgttcaggtaccagatcatgcacttgatcaactctaacatgccctaatttataacgaaaatccttttttatggttaattatcctttcagcttaatcattcaggaaaagaataatcttcaggttttttttgttttgttttgtttttttgagacagagtcccactctgtcgcccaggctaaagtgcagtggcatgatcttggctcactgcaacctccgcctcctgggttcaagcaattcttctgcctcagcctcccgagtagccaggactacaggcatgtgccaccacgctcggctaatttttgtatttttagtagagacggggttttgccatgttggccaggctggtctcaaactcctggcctcatgtgatctgcctgcctcggcctcccaaactgctgggattacaggcgtgagctaccgcacccagctaagagtaatgattttataatagccaaagtgatagtgtattttgaaatcaacgttaatctaatacaataataacaacatctatgtttttctaaaccataaaatcttctcagtattctttgctctctgtttcagggtcataaaggatttcatgattcagggtggagattttgttaatgtaagtactattcctttcctatcaaagacccgtagttttagtttttgttgttattgttgcaattgctgtttttactacagagacccagtcttcaggcttgagaacaatagccaggtttgatgtgggtgttggagagaatggtgatggggaagttcttraaagtggctgggtacgactgactgtagataacmgactttagcactttgattgaggcattaaattccatggtccaaatctcagcctttttgagccagaaattggactttttaagaatacctatagatgatctatgataggttcacactaattagtcatatgaaacttagtcagaaatcagctgtggtttttgtttttttctgaatggaggtaagtctccttctagtgggctaaatgcttgtttcattttctcttttacttctgggtgtcacagtgcctggaaagctgagtttttcataagaagttgatttgtgggcaaggaatcagagcaagagaggtagatagttctggaggaattttgctctattcactgagagagcccagtgaaatagttcttttttgctaaccatagctttcttgtaagtagactgtttttgtcccccatatgaagcctccctccccaccccaaccttggagggtgtgggataaactacattttttctttcttaaacctgcttttgtccttaccccccacttctgaatggtctttctttactcttattaatatcatttggttagttgtgttgctgttttcttggatctgggagacatgtgttctcttttatgtgtttatttagtctgaatctcatgagtttttaagacctctttcctttcctatgcaatacagggttgcagagtggcaggttttaggccgaattacgtttttacctatgttttgattcatctgcatggtgttgtataactgtgaaatggcacaaaaaaatcctagtttttttttctctttaaaaaatggaaagtggaagtatgctgggcctgcatttctcacagtggcagtgacagtgacaattggttggaatcaaggaactggtccctttggacatggcatatctttgccatttcaccagtctccacaactgtttcccttatttacgttgcctgctcctgtgggcatttgtttgcagccccgggaaacagataatggtagtagggtttgttagctggtaagaagggctgagaagctatcctctgccttctttccttttttttcccctaggcttccctgttgccttacaaggagaggaatagctttttactagtctttgccccaggcacatctgatcacttgtcgataactctggggttagacaatagttgctcagtctgaaggccgagttaaaagcaattgctggtagggctcacatctgtaatcccagtaccttgggatgctgggaggattgcttgatcccaggagtttgagaacagcttggcaacatagtaagaccctgtctctacaaaaataagaaaagttattttttatttttttatttttggtggtgtgcgcctgtagtcccaggtacttggtaggctgaggtaggaggatcccttgagcccaggaggtcaattcaaggctgcagtgagccatgttcataccaytgcactccagcctgggcgacagagcaagaccttgtctaaagggaaaaaaaaaaagcttgcttagaaccttccttggggaaggcaaaatggaatgagcaagagtcagaaaaatcagaatttgagaccttccaaagtttgaccaagaatatttgtttgttcatttatttttggttttaatagtatttattattttggttgcaaaagaaaagtgcaaagaagaaaataaatcaccaaatgaattaccctcattctcacctcacaatatactattggcattttggtttacagttgtcagtcttaccttagtatgtatatgtgtgtttatataatttttaacagacttaaaataatctatatgttttactttttttgtacttcataattgtccatattttcccttgtcgttatgtcttctaaaacatgctttctaatagccacctaatatttcattatgaatagacaagttatttgatcaattcactatagttgaagataagttgctttctattgtttgctccaaattattaattttgtaattttccctattgtttctggagagctatagataacgtgattacggagaatggcacggtaactgatgtgtcccttaggttcactgggaaattggagatgaacttgttttctctcttccttctgtattaatatgtatgtgtagttagttaatgacatattagcttatttgattatttatatagtactatattgtttgtacagtgctttttacagacactatctaattgaatcttcatgataactgtaaagagtaggtaatttcatcctcacttgatagatgaggaaattgaggctcacagattggaagtgactttcccagctctaagtgatagatctggaactcaaattcagatcttttttttttttagatggagtctcgctctgtcgcccaggctggggtgcagtggtgcgatcttggcttactgcaacctccacctcccgggtgggttcaagcgattctcgtgcctcagcctcccgagtagctgggattacaggtaccaccaccacacgtggctaatttttgtatttttagtagagatggggtctcaccatgttggccaggctggtctcaaactcctgacttcaggtgatccacccgcctcagcctcccaaagtgatgggattacaggtgtgagccaccacaccaggccaggtctttctaatatacagacttgattttattttataatatttaggcaaacaaaggtttgaatttggacagtttttctttattctctggcttatattaatggtagttcttttccaaaaagggacccttgattcctcactgggtcagtgttttccctttctcccatgtactctttctctttactaactggygaggagagcttgatctttttggcactcctcaatattgcctttaaaactcagggattctatttaaggcactgcaaatatggccttggtcaaattgttttattacccagacttcagtttcctcacatgaaaaatggggaagatgataatgcttattcctcaaggttgctggaagagcaaggagataatgcaaataaagctagtttaagcagaaattgggagtttataataaagggagtgtttcatggaactaaaggaagaaatagaactaggaactagaaccatagagaaccaaggcagttctttatctcygtttctctagtgctcgctacacatctgtgttgtgttctctctctgttctctagcccagcttgcaaatggtagtcacatccagctttcaggtttacatgttacaaatttagcctcaaagagagcatctatcccacctccagattcccagaraaggaactctagttggcccagagtgagttaggcatccttccctagatcaatcaactatgaccaggagggtggtatcatgttgtacatacagactgccaagagctcacccaccctcttagatagtttaggggaatggggtggtagtcacttaagtgggtacttttatgtgactgaaggcatgagagtcttcaggaatggcaaggattgagtatgtgatcaccttgttgctgttccctactttgtctgcatcttaattgatcgttctagaggcccagctgtgacctcttttatccagtctataaaatgctccagccagtctttgtgggctgtaggtaccttatataaggcttgatctgattgcagggtggggtcaaataggtgcagcttccaagatgaccaacaagagtaagagtagactttaaagatgtcatgctttaggtgcgacagtgttcttcctccggtttccagggacccarcactccaagtcactaatacttcccttctctctgctcagggagatggtactggagtcgccagtatttaccgggggccatttgcagatgaaaattttaaacttagacactcagctccaggcctgctttccatggtaagtgaggtccaatcaaggttttgggttatagccagctggttcctgggcccctcttgaggcccagtgctgtctcttgggatggaagcaaatgctttccttctcttgcttggcccaggactcacctttaccacctcctttcttagtctggtttgactgagaaaaccagtaggtatgctggctcacgcctgtaatcccagcactttgggaggctgaggcaggtggataacctgaggtcagcagttcgagaccagcctggccaacatggtgaaaccccatctctactaaaaatacaaaaaattagccaggtgtggtggtgggtgcctgtaatcccatctactcgggaggctgaggcaggagaatcgcttgaacccaggacggggaagttgcagtgagctgagattgccccactgcactccagcctgggcaacaagagcgaaactccatcttaaaacaaagaaaagaaagaaaagaaaaccagtaggtaaggcccactagcaggctagcaggctggggaactaaaatctgaaccaggatttgtgtctgggcattcagccctactgctcagaatgtaaacagttgtgctttcaagacatattcatagctgggtgtggtggctcacacctgtaatcccagcactttggggaggccgaagcaagaggattgcttgaggttgaggtcaggagtttgaacaatctgggcaacatagtgagacttagtctctacttaaaaaagaaaaaaaaaattagccaggtgtggtgacacacacctgtagtcccatctactagggaggctgaggtggggaggattgcttgagcccaggagtttgaggctgcagtgagccatatcctgttcatctctgtatccttggatcctagcttaggccctggctcataataggtgctaagttagatttactgaaaaaaaccatagaggaatcagtgttacaagctcttttggaaatcttgcccttcagctaacatggccggggaaacttactgcaggtatatttggtttccatcaggcraacagtggtccaagtacaaatggctgtcagttctttatcacctgctctaagtgcgattggctggatgggaagcatgtggtgtttggtaagtcctactcctgtctcatggtccaggccccattcaccctggatggaacctccagaggagttagttctcaaactcttaccaagaaagctcaacctgtgtaactgcttaggtggtaatagagaaaacagaaatggtggggaggtggggaacatgtgtggctagagaactagagggaaggacaaaaggaccatttgatatagtatggaaccacttagggagaaaacccagttgctagcaccaaagaaatgccatagaggcagcatgatacggtgagactttggagtcactcaggtataagtttgagccctaactctacttattacctatgaccttgagcaagtcatttcacctctaccgcatcttaatttcctaaagttagtatgagggtttaatgagaaaatagctaagaatgggctttggaagctggaaaatgctatgtaaacaagaataaagtccagctcatgctcttcctacaggaaaaatcatcgatggacttctagtgatgagaaagattgaggtaagtactgctttgatttttctgtttctctgccrttgtggtctggtactgtctgactagcgtgcaggagctagagaagggggaatgagctccagtttgttaggctgtcttcattgccccaggaaaagggaagagaaccacctaagttagcctgtctggccaacactgaggtttggcctctgatgatcctgttgcctacttgataaaattctactcctcagcattgcgttcaaggtccttcatgattagtccctgtctacctctccatggccccttcttctgccattgcctcttccatgttccagtcacatcaggctactagctcttctctaaatctgccatgcatgtccctgcygcttgctctttcctgcccctgagcctttgctcacacagtttcctctagccggaatgctcttctttccttccctcctgatggaatcccattcatccttctaggcacagttcaaatacccctcttttgtgaatccttccctgacctctttaagccccaatttagttgcctatctaacccttatccaattctctcttataactttttcttatataatcataagtttgatattttctaagtgttttgcattttctctttgataggtattatatgctttacctgtctgccaggacatggactgtttctgagtgctgagtccttarcacagggctggcaggcatcagtaaaagtttgataagggaacgaggaagtgcctgagtggatgaatctccattgtgctttttttcctagaatgttcccacaggccccaacaataagcccaagctacctgtggtgatctcgcagtgtggggagatgtagtccagacaaagactgaatcaggtaagtgtgtctttctcctattaggttaggaatcagacctcagagaaggcagcatggtctagtggaaagaactttagtcttgaagacatgagattgagcccagttcctccgtgtatggccttggagtagtcactttccttctctgagcacatttcctcatctgtcaaatggaaatactgtaatacctatctctcagagtcactgtaaaaataaaaagagaaagggttgtaggagcactttacttttctatcactttgtaatgtacaaagtatcaatgtgaaaactactcaggcagtttgtaacagcactctcagactacagttccattcagtagtccccctagaaagacctggctccaggcctgagtaactctctgctgggaccaggccaggcagccaggagacacacctgtcatgcctctcatcagaactgatactgcaattccaggcctcgacttcatattcgctggcctcataggtgaatgccttgcatcttccagcctacatggactcatttcttacccgtaattaccactgcctgctctgcgctgggcagcatgctagctgcagagagggggacaaagaattgaaagatgtctcctttcaggagctcatggaaagtaagacattcccagaggtgatcactagtaatatgagtgacattgccaagtatgagaagagtacaagggagaaatccatcacttccagccaggtgaggggtagtgatgttttgtttttcttttttttttattttcaaacctgcaaaaaagttagaagataataccttgaacaccaatatatcttcacttagattcaccaatgattaacattcttgttttattgctttgccttgacatttgtttttttctttcccttcttgcctcctcacccatttccattgcctctcctcctccctcctgctcctcttccctccctccatcctttccttcctttcttcccatcttccttcctttaccctttcttcttctctttcccatttgaaagttgcagacttcttgacactttacccctaagtatttcagcaaggaactcctaaaaataagaacatcctacgtaaccacaatattatctaatatatagtacattttcaaacctccccaattgtcccaaaagtaacttttgtagcttaaaaaaaggtgatccaatcaaggttcccatatttcatttcatttggtttacacaagtaacataatacactctcattgtgaaaactttcacaccaaacagataaagtgaaagcccctcttgacaatacccacctgcaattccactcccctttccaaaggtcacttccttattagtttgatgtatgtccatcagggcctttgccttgcccatctaattttgggaggttttctttttcccaaatgaaatcatactatatttttcatgttctaaaaaatatgtcttgaaaacttttccttcttagttcatgtaaaaccaccttgtattaaaaaatgaaaacagcccggcaggaggtggctcactcctgtaatcccagcactttgggaggccaaggagggcagatagcttgagctcaggagttcgagaccagcctgggcaacctggtgagatcccgtctttccaaaaaaaaaaaaaattagccaggtgtggtggtgcatgcctgtagtcccagctactcaggaggctgaggtgggaggattacttgagcccaggagtttgaggctgcagtgagctataatcacaccactgtactccagcctggatgacatcaaaaaaaaaaaaaaaaggaaaagaaaaaccgaaactgcagtgcaggctgagcatccctaatccgaaatcccaaatgctccaaaatatgaagctttttgagcactaacatgacattagaagtggaaaattccacacctgacttcatgtgatggatcatagtcaaaaatctgtttcatgcacaaacgtattaaaaatattgtataagattaccttatacaatagctataagtagctaggactacaggtgcatgccaccacgcccagctaatttttatatttcttggtagagatggggtttcatcatgttggccaggctggtccccacctcaagtggtctgcccaccttggcctcctaaagtgctaggattacaggcgtgagccactgcccccaactgagcattagttcttaattttatatgttgtaattgttttcttcagaatatattttaagaaaaaaattagtattgtgttgcttaagtttggtgatattctttgttaaagagaagttctaaattttgatgaagtccaaattatcagtctttcactgcttttcagttttgtctcatttaaggtctttactacctcagatcacaatgttttctgtgttttttctagtatttctttttatatggtggagctaagatcatttttctagtatttttaaagtcttatttgtacatttataaaatcatctataattaatttttctgtatagtgttaagataggactttttcttgtctttttttccaaatggagatccagtcaaatacctgaccattttaatgactctacaacacacctttatctgtgaccaactctgttcagaaagctggcacttacaggcattcagtaaaaatttattacatgagttaagtagagagggagaatgtcaggcattttaggcggggaactcgtgtgagcaaatgctgaggctggaatgcacaagtgtgtgctgagagctacatgtggacctctcttgttcagccagatgatcccttctcaggcccacttgacaccctgagctttcctttctgccaatactgggtcccccttgggcccagcctgctctccctcttcaatggctgctggccattccctccgtctcctactcatttctttgctgtaactaaagttgagttcataggtcctttcttttcaaagactgaccactgatcactaccagaggacaaacgataacaaaaagaataaagtttagaaattcttaatgttggggcctcttttctgtatctttttgagtcttttacataaagttactggaagtccttgttgaggttttatttctgagggtggggatcatcaaccctccccgctctcccccactgttagcaaaagttatatgaacttttgcttccaagaaagcccttcttctcagcctgcaacccaagcagaacgcattcctcaggtggccattgtacattccacaggcccgctagaccaggactgtccataggctgtgatgatggaaagattctagatctgggaggtccagtatggttgctaccagccccatgtgacaacggaacacttaaaatgtggctggtgcaactgagggactaaactgttaactttttattttttatttattttttatttttttgagatggagtctcgctctgtcgcccaggctggagcacagtggcgccgtcttggctcactgcaacctctacctcccgggttcaagcaattctcctgcctcagcctcctgagtagctgggattacaggcgcacgctgccatgcctggctattttttgtatttttagtagagacggggtttcatcgtgttagccatgctggtcttgaactcctaagctcaggtaatctgctcatcttggcctcccaaagtgctgggattataggcgtgagcaaacattcccagcctattttttttttattgacagaactaagctgtagtttattaaatttaaattaggctggatgtggtggctcacacctgtaatcccagcactttgggaggccgaagcaggtggatcgcttgaggccaggagtttgagaccagccttgccgacatggtraaacccatctctactaaaattacaaaaattagccgggcgtgatgacacacgcctgtaatcccagctactccagagacaaaggcacgagaatctcttgaacccgagaggcagaggtttcagtgagccaagattgtgccattgcactctagcctgggcgacagagcgagaccctgtctcaaaaataaataagtaaataaaaaaataataaatgtaaagagccagttgtagctagtggctactgtactggacagtgaactcttttaaatgtaagcttctcaatctactcgccctggcttgcttagaactgaatctcgtagctaatacttaagggcactataattaaagcagttatccttcaatgaattcttcctgtgcccggataatgagctaagaactttacttgaattatcgcatttcactttaccaaaaatccctcataggttttaaggtgttaggaaatctgggtggcagtctaatgtaaaggggttctacagatgggcaccccattttgggtttctgaataatgtgatttaagaaaaattaatgaaagaggagatgaatttcccatggagcaggggtgtggagggaagggaagtggtatttttaagccctattgggcagtatttctttctttctttttttttttttttcgagacggagtcttgctctgtcgcccaggctagagtgcagtggcgcgatctcggctcactgcagactctgcctcccaggttcaagcaattctcctgcctcagcctcccgagtagctgggattacaggtgcccaccaccgcacccagctaatttttgtattttttagtagagacagggtttcaccatcttggccaggctggtctcaaactcctgacctcatgatccatccgcctcggactcccaaagtgctgggattacaggcataagccaccatgcctggccgggcagtatttcttatactttaacgttcatacggatctccaggagatttgttataaaatagtggttctgactcagtgggtttggatggggactgagattttgcatttctaatcagctctcaggtgatgctgatgcagactgtgaggcaagtcaataggggataagagtctatcttttaattgagaacttgccatattccaaaaaaaaaaagaccaagaggaagtactctcttggtggcactagtccagcaggaatccattgcattcacatcaaggtatcacctaatcctgcatttgaggccttgtgcccaggcactggacatatgcagtgaaacagctaagaaggagatagaagacgggtcacttgatcaattctacctccctatggagcacttctttccagaacctttgtgttttgccttcctaggttctgactttggttttagtgaaaatgaagttttgtgtacaattttttttttttttaagacagaatctcactccgttgcccaggctggagtgcagtggcacgatctcagctcactgcaacctccgcctcccaggttcaagcgattctcatgcctcagcctcccgaatagcagggatcacaggcatgctccaccacgtctggctaatttttttgtatttttagtagagacagggtttcaccaagttagccaggctcgtctcaaactcctgatctcatgtgatctgcccgccttgacttcccaaagtactgggattacaggcgtgagccaccatgcctggtctgtacaactttagttatagaaaccttggttttatctcagtgagttctgggagagtttttttttttagacagggtcttactctgtcacccaggctggagtgcagtggcgcagtcacagctcactgcagcctcgacctccctggctcaagtgttcctcccacctcagcctccttagtaggtgggattataggcgtgcagcaccacacccagctaactttttagagatggggtttcaccatgttgtccaggccggtctcaaactcctggcttcaagcgatcttcccacctcagcctcccaaagtgctggaattacaggcatgaaccaccgtgcccagcccttggaaaactttttatgatgaatttggttatgtatagcataaatgaacctctacactcaggattctcctgctgtagtctgaatgggttgtttgctacttacatggacatgggagagggtggcacctctcttttgaaagcccgagttctggcagctctgctagtctgatatgcttaccctcttccctgtgatcctcaaacctggtaccagtaccaaatggtagagagctttccttaattcattgttgcctagattctccaacaggtaataatcattttggggcactcgttaaacctacgaattcctagatcccttccctggagtatttgattgagtggctttggggtgggaccaggatgttatgtttgtaacaagtatctcacatgcttcttaatagagaagtgtgggaaacactactttagttagtggtgggatgactgtcttttattttaatatttggatcttaggaaaaaatacggaattagcacaatacatcattttacagttattacagcttatagtgaggcaatattgaagttcaaatagtgattagcttaaaaaataaattgtacctgtggatgatagatattgtaacagttgtgaagatgctatttgaatgactaaggtttaggaaacactgtgtttcattctagaattacctatagatgcgagacattcccgtaggggaagattaggaaatatgtgttggtggcagttgggctggtcctctattcattccacaactaagcgctgatgaattaagatagttcccatgctgcatatgaggctacagatttgaaaagtcagttccatccttcaaggaactcagtctcttgggagaactgacaattacagtacaataaagccctgtattggaggttttagaacaaggtgaggaaagcataaatgcccggatcttcccagagtggttgagtagactacagaagagatgatgcttcagtttagtacaagaaagaatataacttgtcaggtggctaaaactgggcagggcattccaggcagagggaacagcctaygcaaagtcacaaaggcaggaaacagcaggaagtgtagaggaagctgcaaataattcaatatgactgaagcaggaagatatgaaaagcaaatggtgagaaggttggagagaggccagggccagtagtgaaagccagtgccaagtttagcagttcatatgttattctgagggcagaggctgactttcaggcatgaagtaatttttcccttttggggaaggagtccactgtgctcctgagattctcaaaaggggcactgaccctccaaaaaagaatcaggccaatatgaaccacttaaggattttcagcagaatactgtagatgaattttcatgttcagaagatgattctagcagcattgtggaggatgggctggaggccagtgaggagtctactgcagtagtagtccaggcaagagaaaagaggttttacatgaaaatatgggtctggggaacactggagatttggcagcaaatatttatgtgcctgctgggcatgtgacactgtatgttccctgtcctgaaactcagaagctctgccagctgaaaaggccaggagtggagagaatgtctggctccagtccattccagtccagtacaaaggcaaagctgcttgcattgcagccaagtcttacacacgtagaggttccattctcttcagtggaatactatacagccttaacaaaataaagaggtagatctggatgtgttggcaagatttctaaggtaagttaagtgacagtcaagatgtagtaatttatgtaagcatgttactgtttattttgaatgactttcaggaatctctgcagtgatatatagcagactgtggataatacttctgcagagtagagatagcaaagagacttttcagttgccttatttaagcttgaattttctaccttgaacatgtatcttgtaatagaaatacatactgtttatatgtagtgttaactaatcctaaatcctcccagcacttcccaggagcctgcccacagctgtggctaacatcaggtgtgaatccattgctgatccctccacctcctcttccaggtctaagcccagacagtgggtgctcccmcagcacttggttcatctctccactgtggcatttaatatactgtatcacaaatatgtaagtctgtttttctctggactgagaacttgttgaagcaaggatcatgctgactaacatagtgcctggtatgacagagcttaggtcctggcacaccatgcagcttacaaagtacatttatacattttcatacactttgcttgagggcccacagttaaacttcagtctgtgcctgcagtacgatgccagtacccattgtccactggagcaaggtgtggcatgtttgaggaatggcaagaggagggggacaatagtatctgggtgtacttactctgttctcttagtatagcttgctcgacttcaaggccataaacccagagtgtggacttccctttctctttacctctgggaccgaaacctgcaaggaagaaggattgctttttgttctggacctccacagagagccatcagagtctgacaaaaaggacaaaggctttggagccaagtagaccaggaagtctcatcactgtctaattctgtgacttcagtcaagccatgaaaccccttgggaccctactcctttgcataattagataatatataatgcatggagttgtgaagggcaaataaatgagatagtatgcttgaccataaatgttagttgctttcttcctggttcttttgtaatttactgcccaactttgctctggggacctaaaggtctgacctatggtgagaatctgacctgttctacccttttgggaaaagaggattaggagtgtagagaatagctgggagtggccgggcacggtggctcatccctgtaatcccagcactttgggaggctgaggcagggagatcacaaggtcgggagttcaagaccagcctggtcaatatggtgagaccccatctctactaaaaatacaaaaattggctgggtgtggtggcaggcgcctgtattcccagctactcaggaggttgaagcaggagaattgcttgaacccgggaggcggaggtggcagtgagccgagatcgcgccactgtactccagcctgggcaacagaatgggactctgtctcaaaaaaaaaaaagagaatagctgggagcattgtctcatatgggatgtccccttccagttcctctgaggtgcttacctccccatcccacactgacctccatgtctctgccattgtaggccttcccttcttcttggtggtgttmttgagtaagataatctggactggcccccgtctttgcttccctgcctgctgctgccccatttgatcaagagaccatggaagtgtcagagattcagaatccaagattgtctttaagttttcaactgtaaataaagtttttttgtatgcgtatgttttttttttcttttggttttgtttgtttgtgggttgtttttaaatagttgtaatagccctgtctcctcacacctcagctttagctaggaggactggcactcctcagaggccagcatggaccagagccaagcttttgctgtgtatagttaatgcctcttgacttgcaggcagttgtagcaaacctaactctcttaggttaaagctgatggacaaagaaggcacagccccaggactttacagctctacttattccaaggatgttcccagaaggatcaatttggttagttctggattgagcccgtgaggaaagggtcactaacttgacctatctacttacctcagagcatccttgaaagagtcaaataagagagtggatatgaaggtaatttgtagtaaacagcaacaataccttagaaaatgttagttttgggaccgggtgccgtggctcacacctgtaatcccagcacttggggaggccaaggtggacagatcacttgaggccaggagttcaagaccagcctggccaagatggtgaaaccccatccctactaaaaataaattagctgggcttggggcacgtacctgtaatcccagccacccatctggtggctgaggcacaagaatcgcttgaacctgggaggtggaggttgcagtgagccgagatcgcgccactgcactccagcctgggtgacagagtgagactgtctcaaaaaaagaaaatgttagttttgaaaggaaacagttcaacatataaagatctcacttagctgggtgctgtagctcctgcctataatcacagctactcagaagcctgaggtgggagaatcacttcagcgtgcagaagttcaagacctgcctgggcaacataccaagaccttgtctgtacacaacaaacaaacaacagcaacaaaaaaattagctgagtatggtggcacatacctgtagtcctaactgctcaggaggctgaggcaggaggatgcttgagcctaggagtttggtgttgcagtgagttatgatcgtgccactacactccagcctgagtgacagagtgagaccccatctattttgaagaggcaaagaagaaagttccctgatgtttctttcatgaggcactttctgtttgctctcattcttatttgctttcttctgtcttgtggatggggatgcctcttaactactggcagcaagatactgcaagagcaaaggtagcaaacagctgaattctatgacaatagaacttggttaaaagtgttgtttcagtgtatcagatgacaagagatggtgataagggccctacagtacagacatttgcaactctagccaaggaaacatacttcagaggacattgtagagaaaggactgtcatctagtggaggagagatttttaagtaactatatagggtgggattgtaaagagatggggaggatgaacagctgtgatccggagttgacattcttgagatgggctggtcagctgcactctgttacatctggcacctacattctatgccagtctctgtcctaggccctggagctaggtaagatgtggctcatgcttgtgataggagacagggacagtttcaatgcatggtggtattagaatgtgagcccgtgtgagggcagggcaggatatttgggttttttgtttttcgttttgagacggaatctcactctgtcgcccaggctgcagtgcaatggcgcgatcttggctcactacaacctccacctcccaggttcaagcgattctcctgcttcagcctctcgagtagctgggactacaggcacatgccaccgtgcccgtctaattttttgtatttttagtagagacggggtttcactgtgttagccaggatggtctcgatatcctgacctcatgatctgcccacctcggcctcccaaagtgttgggattacaggcgtgagccaccacgcctcgccgatctttttgctttgttttgtttttagctgctgtgtccccaacacctggaagaactgagcttctggaatctaatagatgctaaataaatatttgttgcatgaatgatagtggtatgagaggaagagggaaaaaaaacggaaaaaggcttcttggaagaggtgacacttgaggtaagtattgacaggctttaatatgccagatcaacaaggtggcgagggctttctaggaagagggaactgtgttcttaggccacagtctattagagatggggggacaaggtaaaagttattttgcagagaagattcttgggatgaatcccttgcccatcacatcacttaaaggcaggcactggagttgtctgtactgtgctcaccacggacagctggatggtgtgagctcccaggatggcagggagactagtaaagctctgcagtggtgctctcccactttggaacagtcatgaactattggtgcttgtagagaggtggctacaagaaaattattttttgagacatagtttcagtctgtcacccaggctggagtgcagtggcacaatctcagctcactgtaacctccgcctcccgggttcaagcgattctccctcctcaaactcccgagtagctgggattacaggcacatgccaccatgcccagatcatttttgtatttttagtagagatggggttttgccacgttggccgggctggtctcgaactcctgacttcaagtgatccgcctgcctcggcctcccaaagtgctgaggcatgagccaccgtgcctggctgcaaactagtttcttaaacagcttatcctcaggctcactgagcacgaagagagctgaatgaagtaactggatgagtaagtaatgatactttttaaagtaacattgaaaagacagatgttacacaatttgtatttttgcttgagaagccatcccttcaaagcagttacatagtgaggctgttcacttattcgtagaggtgctgctgcaatattttctaagtgtctttgtaactggagaaaagctctcaagcctatagggcatgcttttaaatgtcctcagtgttggcaggactgccttttggggaaacattttaacattcaagtcatctggagctggaacacatgaacaacagctgtggaatccacccactctccatacacattgctgctgaaagcctttttcacctggattactggcacagctgcccagatgacccttctgctgccagtacctttttcaattcatgttctacaccatgtcgctcatttaacgaatcttttaaggtattatgtgtcaggcactaagatgcccaaggaagtcacagtctggtggggaacatttaattagagcaatacagtgtgttaagatgggagggattcttaacctagtagcatctgagccaagacctagaggatgaagaattaagcaggcaaagaggaaggaggaaaggaagagtgttgtatgtagaattttatgtaatactccaaacgtaacagtggctaaaggactccactagatgacagtcctttctctacgatgtcctctgaagcatgtttacttggctggagagttgcaagtgtctattctgtagggcccttgtaatatttcaccatctcccttgtcatctgatacactgaagcaacacttttaaccaatttctattttcatagaattcagctgtttgctacctctgctcctgcagtatcctgcagccagtagttacaagcacctggaaggttggacagggaatacaagagaagactctaagacttctcttagaagtcatagagtccagtaaaccacattatggaatctggactaccctaagggtaatggtagtcactggaagattttaagtaagacagtgtcatgatcagatagatgttctcaaaagaactttctggctgttgtggtgggtaatattagagtaagaaagaggtagagaggtgtggttagtagccaacagcactgctctatgctaggggtcagccgactacactccgtttttctgtggctcatgagctaagaatacaaatggtttttaaaatgtttaaatagttgaaaatatgtaaagattcgtgtcatgtaaaaattaaggctgttttcaagctccaaacctgagtagtaagtcagaaccatatggtcggccaagcttatattattaactatttggctctcacagaaaaaggttcctaccccttgctctaagcaattggtgatgatggcctacagtagtgacagtaggaatgaaaagactctgaattgacatttagagggtttaggactgactcaagaacgcctttaggaggtggaactcacaggcctagacggcattggtaggggtaaggaatactgcattagcctcctaactgctttctctacttccattccttgcccctctgcaacccattctccactccgcagccatttttaaaaagatgcccctccctacttatgactctaaaattgctcttctcactcttcccctcaggatatatttccaattaaatatacctaagtgactgcccacctctgcaacccaatgtcacattcgagtcttactgaactacttgactgcatttcccgagatctcacctcttctcgcctgtaccctgtgcgcggaaagtcagccctccaccttctccctgcttccactcccaaaatacttcgtggttttgcagctctggagtatttaccgtgttggctgtttaaatttctgcctccatcagaaggcagaaactgactcgcgaactattccatccccagccgatagtagacgcttaaaaaagaacgaaagaaggtgggtggaggacttcagtaacatcaggtggcagcctcaattttatcgtttgtgaaacgtggatagtaatccctctatcacgtggctgttgcaggaataaagtgaaaaaacaaaacaggctagcttgttcaataaatgtgagttgaattaaatctgatttgtggtcagtagaaaaagatgtgaatacttggaaaggaagacacatttttttaaatatatgcctggtaaaacggatcagaaggcaggtccccatggagcacaccctcgccctaaacatgctgaacccgggctgccatagcctgcgtggtccctccaaggtgactgctccgacaaaagggtacgctcttcaaacgcatacgtttaaggcaattccagaaaccctcggctgtgccgcgactacacggccattaaagaaaagacgactctatgcccgccgtaatgttctcagatcacagggaccgtatttggagctgggagggagggaagccttttcttcacggggggctaaggcgtcttcgagcccccttccaatcccgggtccggccgggtaatccctgcccagcgttcgggcgtgcctttttttcagccgagacacaaccctgaacgtggggcccgccagcccggcggctgcctcgtggaagtcacgttccttctgcccgtcctctcgggtactctatggttttcgtggccgactactctaattctagttccggtctctatggcggccggcggaggcaggaacggttgtaggtcgactgaattagccgccaaaggtccaatgagaatggaggactgataaaatattagccaatagaagctagggattggggtcaggtgggcagattgacagtaccactggccagtgaacaacgcctagggcgggtcgctcgtagggcttatcccgcctgtcccgccattctcgctagttcgatcggtagcgggagcggagagcggaccccagagagccctgagcagccccaccgccgccgccggcctagttaccatcacaccccgggaggagccgcagctgccgcagccggccccagtcaccatcaccgcaaccatgagcagcgaggccgagacccagcagccgcccgccgccccccccgccgcccccgccctcagcgccgccgacaccaagcccggcactacgggcagcggcgcagggagcggtggcccgggcggcctcacatcggcggcgcctgccggcggggacaagaaggtcatcggtgaggaccggacagggacgggggtggggc

SEQ ID NO: 94985 - DNA, 33018 bp, Homo sapiens
aactgtccctattctacccaatttttctccctttccccctcaacttgtcctgccaaaaactaaaagctttgtgaagcaaaagcttcagggcaacatgtctgaagcccagatcagtcccattttccattttccctttccatcttgaactcctctctcactttcctgagccccaggtagatgaaaaaggtgtacaggataaccagtttcaaagaagaatgaaggtagggaaaaaaataatgagtaaatctagttaacataccacaacctcctcaaactcccgggtggcttccacaagcatctttttgactgcttcttcattctcctggatttcttccttcacatactcttcttcaggcaaatctggagttctcttattctgtggttctgttaaagagaagaacagcacagattagcaatagcctcttttacataaaccaaaaatatatttgctgtgtgagctctgggccaggagtgagcctgcacttttttttttttttttttttttttactatcagaagacatctgttcttgattcagaagggtaaaaaaagcctaggacgtgctcattcacccatttctatgcttgcttctgaaaagatgtactatccaaacaatgatacattcttaaactctgacatataaaaatgctcaagtttaattcattttttgctttgtagttacagactttgcaaattaataaaaatgtgtcataaattgggttccttgggaagcaaattctgagatggagatggaaatttaaagaattgggaagtgattttgggaaaacctttgtggaagagcaggagtgggcagagagagaagctgacttatcaaagagtttcaacaagacctcagccaaaaccatgggcaactctggagctaggaaggcccttcagaactgaccaagctggggccaaggagcagactttgtaactctgcaaatatcagtcactggatggtggcagccctaagaagacaggagtttgggcaaggcagctctcctagcagccaaaggcagatctgggccacgtaccacaatccaccaatataccatctacaaaaaggagggcctcctaaatttaaacatcctgttcctttcctttacattttgttctctgaagatttaactctgctccttttctacttactaaaacatactacaaaggggcagcaagagggagtttttcgtgatggaattgttctaaatcccaatgtgggtgctggttacaaaaatttacctatgttaaaacacatataactggaaaagagtacagcagttcctcaaaaaattcaatataatttcatgatgacaacccacaaggaaaaagaaaaaattaaacataaaattaccatatgatccagcaattgcatttctaggcatatacctaaaataatggaaagcagggtctcaaacagatactagttatacccatgttcacagcagcattattcaaaataaacaaaagatggaaataagccaaatgtcaattgatacattaatggaaaaacaaaatgtagtatatacatacaatggaatattattcacctttaaaaaggaatcaaattctgacacatgctacaatatggatgaactttgaagatattatgtaaagtgaaataagccagacacaaaagggcaaatattacatgattctacttgtatgaggtatctagaaatattgaattcatagaaacagaaggcggaatggttgtttccaggggctaagaggagggagaaatggggaattagtgtttaataggcatgtttctgacccctagaagcagaaaataataaaaggcatggagtttcagttttagaaaatgagtaagttctagatacagatggtggtgacagttgcccaacaatgtgaatgcacttaataatgccactgaacagaacacttaaaaaactatctgaactgtaaattttacggtatatacattttaccacaataaaaaataaagtttttaaaatgcatataattttacaccataaaaagttaattttactgtatgtatttaataaaattcttaaatagtaactaaaagaggcttatctttgagagatacatgctaaaatagataaaatgatatgatgtctggcatttgcttcaaaacagtccaggaagttgggatgaaaagtatagatttaaaaaatgccatgaactaaaatcaggtgaaggtgggtgatgggtatatgcagtatagttcattatactattctgtatttgtaaatgcttggaattctccataataaaaagtaaattactgttcattcacataatgaaatacagtgcaatcaattagaaaagaatgaggaaaagctttgtgcagacacacaaacacttcaagataaataattaagtttaaaaaaagtaaaccacagattaagttgatgtctagtgtgctagtattactatgagcaaaggggacatgcaacagacaagagacggtaatagaggctgcccctaggaaaggacccagggaaaagggtatgtaaatagggagactgccttttcagtatgtacccatttgtactctgagtatatctacgggataaattcctagaacaaaactgccatgtttaagggaatatacgttataaatgtcatcagatattgtcaaaatgccccccaaagaaattgtatcaatttctattaacaacgtaggagtatacttgttttcccatacactaactttggatattacccattgtattgacttttgccaatcttatagataaagtataacatctccttgctctgatttagttaaaaaaaataaataacttggggagcttttgttctattttgtataatggaagctatctcaattcatcaaataaatacaaaacaattccaacacacatatttattatctcacaggtctcatgggtcaaagtatagcttatactgaccctaggctcagggtctgatttactttctttcttcttctttttttctttccgagatggagtctggttctgtcacccaggctggagtgcaggggcttgatctcagctcattgcaacctacacctccctggttcaagcaattttcatgcctcagctgcctgagtagctgcgattacaggcgcatgccaccatgcctggatagtttttgtagtttttagtagagacggagtttcatcatgttggccaggctggtctcgaactcctgacctcaagtggtctgccaccttggcctcccaaagtgctaggattacaggcatgagccaccgcactcggtctgatttactttcatttaataacagactatttcttcatttgtttatcggccgcttatttatttccttttctgggaacttcctgttccatttccttttctcatttttctattagttttctttttacttaatgacttcttacttaatgacaaagagctctttagacattaaagaaactaagtctattgcagtgtattgggaatgtttttccagcatgccctctgactttatttatcatgagaagttcttaattttcaggtaatcaaatatataaaactttttctttgtctttttggcttcataacttatcaccatgctaatatttttactttttttcttctggcaaatcaggcagcatcctgaaccacaaatggttcagagcaactcccaccatactgatatattcattcatatcttctcttactcattttagaattttttaatttttacatttaaatatctgattatcaaaagattacttagatgggtaggatgaatacagcttaattttgtcccaagttccaaatggcttgccaatagccccaacatcacggatttaaaagcaagtcccagacacagcatggtggctcacacctggaatcctagcacttttgggaggccaagtcgggcagatcccttgagcccaggagttcgagaccagcctgggcaacacggccaaatcctgtctctacaaaaaaatacaaaaattagctaggtatggtgacgagtgcctgtagtcccagctacttggaaagctgaggtgggaggatccactgagcctgggaagtcaaggctgcagtgagccgtgatcgcactaccgcactccagcctgtgtgacagagcaagaccccatctcaagatatataataaaattaaaataaaataaaaataaaagcaaggccatacatgatgacatacttcacccatacacatagccctaacctcatctgctataattaattctccctcctactccattaacagccactctgttctctttgtggctccaaacacaccagccatactcccacctaagggcgattgccctggcttcttcctctgcctgaacactcttccccagatatccacctgggttgctctttcacttccttcggtctctgcttaaacatcagcttatgagaatgaccttctcttatcatcctataggaaaaacctcctccccaacccttacactctgaattatttttctctatagcccttaccactccccagctagcatgttataagctccaggaccacagggacttttatttattgttatattccagcaggaccacaatgtctggcactcaaatttctgctgaatgaatgaagctgaaatgtcacttttaccaaaacaaaattcctactaagcatactgaacaggagaaaaagattttactccccagacttcaagtgttaaatggagtagtcatacaggcaaagaaaaggtgggaggattacggagggggaggagaagcagcatgcctctttaaacaaaagggtctatcggtttaagttatcaatgccaggtacgtcaccaagtacatcttaacagactcgttctgtatcctagacatactgaaccccaattttcaattcaactgcattaaaaactcacttcacctaagcaagaccaggaagagaccttccaactgccgagaaccttcttaagtccataggcattcagttacgccagagcattaaagtaagtctggtacgcctttatactgaatctacctgaacataacagcaatcttttttaaaaaggagtctgtggaatatctcttaaaagaaacacaagaagccagttagcccgtgggtagctggtggacaggaaggacgagataatttttttttttttttgagatggagtcttgctctgtcacccacgctggagagcagtggcgcagtctcggctcactgcaacctccgccccccgggttcaagcaattctcctgcctcagcctcctgagtagctgggactacaggaactctccgccacggccggctaatttttgtatttttagtaggggcggcatttcgccatgttggtcaggctcgtctcgatctccttacctcaggtgatccgcccgcctcggcctcccaaagtgctgggattacaagcttgagccgccgcgcccggccaagagagaattttctatatactttttgtaacttttgaatatagaaccatgtcaatattctagtcaatggtaaagtaaattaaaactagaccaagaagctgggtgtgatggctcacgcctgtaatcccaacactttgggacaccgagacgggaggatcgcttgagcccaagagttcgagacctgtcagggcaacacaacgagacccccatctctacaacaattttttttttaatttagcgggacgtggtggcgcgggagtgtagttccagctacttgggaggctgaagccggagattcgcttgagcccaggaggtccaggatgcagtaggtcgtgatcgcgcggctgcatcacagcctgggcgacggagcgagcccccactcaaaaattaaaaaataaaaacgacgagaggccagacgtggtggctcactcctgtaatcccaacactttgggtggccgaggcaggaggatcgcttgagctcaggagttcagaccagcttaggtaacagagacccatcgcaaaaaaagaacaataataaacaacaagggagcgagaaggcaagaaaatggtgcaaatttacccggatgtcaacagggggcggggccaagcgctgctaccgaagatgccaagatggacgccaggcagccaggagaaagatcccaaccccacccgcgcagatatccgcgaggccccgcgctcagcctcctcacccccgctatccgcggcctccgggtcctcctccgccttccgcttgagcttctgggaggaggggctcaccggcgcgtcccccagcaggtacttatgctcctggccccgcaggtgcttgaggtagcggtccttcagggactgccacgagtgctgcgtgagcgagctcttctccatcgctttccacaaggcgttaccggtgacggagctgggcgagcgggcattttccttcacgtaggtaaggatggctacgtcgtccgcatccgtgaaggcgatccgcccggcgtgccgctgcggctccggctccgcggcgccctcggccagggccccgggctttgcttccgagccggtgtccgccgccgaggcggggcccagccgataggcctccagctccagcctctcgttgcgctccacgcagtccaggatgtactgcgtggagatgaaatcacccgaggcctcggccagcgcctccccgggctgggccagcagcacggccccgggctcctgcactcggcacacggtgccgccgccgtgcaggatgagcgtcgacagccgacgcttggccgggctgggccgcacgtagaaggacatggagctgccgtcgtccctcacgaacagagtcgaggaatgggtgggcccgttggggtctttgcccaaatccatcgcctccgccatgtytgacgccgagcactactagaakagctaccccctcscgagcgcctggcacacagagctcaactgactgagctgtcaccgmagacgcctctgccgcgaagcgcagcactgggcctgcgcagcagcagccgcggmgcatcgagagtgcccgccccytctcccccggaagaggtggggyttcgcaccttgacctggaaattaacgtactatcctccttacttttgggycgggccctccgggaagatggcggccgtgcaggcggccgaggtgaaagtggatggcagcgagccgaaactgagcaagaagtgagtgtcgctgcgagtctttaaagcctttgcggtaggagagtctgggctgggargcgccgcgaggttcccaccaaggctgctgtgccggggccttcttgccggctctcgtgggtacgcacatgctgagacgtggtggctgcgccctgcagaccacgtaccccgggataccccgggcacgccggctccccgttcccagctggcaccrgcgggatgctccctatcatactcctagagttaagagactgtggaggaggaactaggacgasaactaagagttatcagaaaagaaaagcgaaacttcctgcttagcttcatcctcctttctgagaartgcattcttttgttgagccactcagtaaacgtggaagttggagaaatgttaaataccctrgcttttcagaaagaccttcaaaattttctgggcctcactaaggtcattctgaacgttatgtattaaaagggatcagttctaaaactgtcatgcatctacccgtatgggttattcagtagatacctgtgagtattaagtgatcaacgtctaacagtagagaccatcttaattcagcctgatatctttgttaaccactcccaaatccctggagtatgtaggttaacatagataagtcaggattagccaccctttaactggctgtcttatattctcattagcgttccccrtttgaaccacagaacacaggtaattgagtgttttatcattgctaggaagatggtacatagtaccattccagaggcatacgagagggcttaatccccgtggcgcgcacttgttatcccagctactcgggagactgaggcaggagaatcgctttaacccaggaggcggaggttgcagtgtgctgaagtcgtgccactgcactccagcctgggagacttgaggtagtggtccttcagggactgccagaagtgctgcgtgagcgagcccttctccatcgctttccccaaggagttactgagacggagccagaccctgaatgaaaaagaaaagagaaatgatgtttctttttttttttttttaagatggagtctcgctctgtcgccaggctggagtgcagtggcgcgatctcagctcactgcaaccttcgctgccagggttcaagcgattctcctgcctcagcctcccgagtagctgggattacaggcgtgtgccaccatggctggccaatttttgtatttttagtagagacagggtttcaccatgttgggcaggatggtctcaatctcgttaccttgtgatccgcccaccttggcctcccaaagtgctgggatgacaggcgtgagcctgagccaccacccctggcctgatgtttccttttgtgtccctggctttgtgcttcaaatatcttagaaaaagtataagagaaattgtcgaagtttatagttgggtaggaccttaatatattgtcctttattagagcaatccgatggacttccataaaagtttggaacctggtctttggactgctaccttagagaaaattgacttgactttattaagtcaaatttaattgaatgtggtatatctgtgatatacgatcctaaagtttagttcattctttcaaaccacctatgataatcaattacattgaattgaactttaggactgtatatcacaggtgaaagcacggtttccagttcagagtgtgtttttaggtaaacggaaaaaactggttaattcctctttactgactttttttttttttttttttttttggaggcagagtcgttgttgccccggctggattgcagcggtgcgatttcagcccacggcaacttgcaactcccgggttcaagcaattctggtgcttcagcctcccaagtacctgggactacaggtgcatgccacaacacccggttaaatttttgtgttttagtagagacgggatttgaccttgttgcccaggctggcgtcaaactgctgagctcaggtgatccgtccgcctcaaccccacaaagcgctaggattataggcgtgagccaccactccctgcttcactgacttttctaaaattaaatacagctactacttttttgaccagcttttctgtgccaggcacaatgctagatctctacaagctttctgtctagtgtcagtaataaccttgcaagaggagttattgtccatttttcaaattaataaactgaggtcctagtaattaaatgcactattaaagtgtgcattcctaaaatatagtctagcagtgatccagagcactggagcacggatctgaactcaggcctgtgactccacagtccatgctctgtatcctgactgcacagcactactcacgttgtcttacctgtcattgatgtctattcctctcgttaccatgagctaaaataatttttttctgattaacatttccttccgtttattgttctggggaattccttggtctgaaatttttagtaagcaccattttgtgccaggtattgactccaagtttaaaagcagatgtgctccctgcccaagtgaaatagcctcctcaaatttatttgaacacggtaaagaaggtgatctctgtaattctgttgccttccagtgttgataatgtrtaaacataacgcagtctaaggaccttcctgaaattctcctttccccttgttcctagagttccaaacaagtcttctctttgacacgtatttttgtgtggcttgcatttatctttgtctagagtttgcaattgatagtgacagtttcctcttattttatatgcttcctattgccatcttgtggccaggtatttcctctccaggtgagaaaccacacttcagggcttcagaaagtgcctcacatcctgttcccatattctaggatgttgtgagcaattttacctgtaagctatccattaacttgctgttggctttaccccagatatgcatgttttttccatagtcaggactaagaacattgtcagttacagttgtagcacagagagtgttacagggttgctatcagttaagacagtcttaagttaaatgggactaaaaggtagtagaagcatggtccccctccccaacccataagagagttggttgggtatatgtatactgtctgtcccatctgacaccacatctctgtgtttcccgctaggtggtggtaatcattagttccagggtgctctgccatgttgacgcaagctgctgtaaggcttgttagggggtccctgcgcaaaacctcctgggcagagtggggtcacagggaactgcgactgggtcaacttgctcctttcacagcgcctcacaaggacaagtcattttctgatcaaagaaggttggtgcccattaccttctttattgctctggaagcaaaaattatttccttacttggttcattttcygttaagcctctggctaagtctttggacttgttgctaaggaaacaaggagccctaataccaaaaccaatagtcctttctcattttctctttaataaattcaaatcgtctctccttagagtcttgagatgacatgtggatcttattctagaagagtgctaagaacaaaacctttgtttgaacaaataatttctaatgccagctatttcccttttctgtctttctggagttttgtgtgctcttgagattaatttggtttctagtcttagtgctatccctaggacctttttggattatccttaagattgatttgatttaagaggagcacctggttgagtggaaaacagatttatcttaattctagaagaactagacagcctaatcttagcagtccactgactgaattatagcatgataacaccagcacagtgttttggaaaggttgtctttacaaatgttataagacattatatgtagaaaaagctgtcaactttgaaaccattcagaatctgtttttcttttttacaagatgaaagattcggccaggcgtggtggctcaygcctgtaatcscagcactttgggaggccaagacaggcagatcaygaggtcaggagatcaagaccatcctggctaacacggtgaaaccccatcttcactaaaaataccaaaaaaattagccgggcatggtggcggrcacctgtagtcccagctactccggaggctgaggcaggaaaatggtgtgaacccgggaggcagagcttacagtgatctgagatcgcaccactgcactccagcctgggcaacacagcgagmctctgtctcaaaaaaaaaaaaaaaaggtgaaagattcaaaacctcaattcattttttaaagttattctaaattcatatcgaaaatgaaggatgtgtcctgaagccagaatgtttgcgggcatgacttgggatcttctgctgtggttcactattgcagaatatttgattatgttcagcggtttgaaagaatgatccataaattgtctttgaatagtaaagatatccctccctacaccaatctgtttagtttctggtttcagatagcaaattcagacyataagagacatgaacatatcatacagaacagctcagagttgtccgcattactttggtttttcaggttcaagtgataagtatcaagagtttggataccaagtgatttaaccagaratgtatttaaatctatatgaggcacagagagtaaagggttaagatactaaaagatacctagaaagctcacatttggttagctgaatgccagggtcagggtaatccctttatacaaacattatctcattacacaccataacaactggtgggggttgtctattattattttcgtttcacaggtgagaagttaattcactcgtccaagtcacataattgacaagtgtgttggaatttagtcccagrsagcctgactacaaagatggtatattaccccctgtactatactgctttgcacaccgttctattttgttgtctaagtcaggctccagtgggcaaagtgagactaatgctgacagccattcttggagagactgttggtaggggaggtctccttgagtgctaaagagccggctcttccttactatcatcctaactcactcttaggggagggatagagagagggggtagcagagggctggagatgttgccttatcatgtattagatctggcattggaggggtcaggtggctcacacctgtaatcctagcactttgggaggccaaggtgggcagatcacttgaggaaaggagtttgagaccagtctggccaacgtggtgaaacctcgtctcactaaaaatacataaattagttgactgtggtggtacacacctgtaatcccagctactcaggaggctgaggcacgagaatctcttgaaacccgggaggcagagattgcagtaagctgagattgtgactgcactccagcctgggccacagagcaaaactctgtctcataaaaaaaaaaaaaaaaaaaaaaaaaaaaaaaagacctggcactgttggaacttcaccttctagggggatactaaacaactaagattcagtcactgtcctcaaggagctccctaacctaattagctcaagaaaagcctattctaattttctagaaaaccttttctcctattcaaaactaatgcataggattttctttgtcttggtacatcttggttttagttgggacctaatgccaaggacctgagactggcaagcagagactgagagtgatttttcacatctttgttctaagcttatttttccctttgtgtctttcacataaagagtttagtgacaagctacttgagctgagctgtgggtgtggaattgaggggtatagaactgagcaagagcgtttctcctgggcgattcatgtttttgrtaagttgctaggggcagaacatagaggactcttcaggcagctaacacattgaacgctttcatctttccaacagtgagctgaagagrcgcctgaaagctgagaagaaagtagcagagaaggaggccaaacagaaagagctcagtgagaaacagctaagccaagccactgctgctgccaccaaccacaccactgataatggtgtgggtcctgaggaagagagcgtggacccaaatgtgagttccctgggccaccagcatggttgggcacaggaaagcttctgatgaggcttctggcagattctttgggactggacagtaggagggaccagtacgcctgaggtcactgccagggataagggagggtctcccactgcatctggttaaaggcacagaccctgagtgttttttatgtcaacccccaaaaggcatttgagagagtccagcattcaagtgaattaaccttccttggaattagcttgaccttgaggccccagggaaagtgtctctctaaagattgcctgaggtttactttagaccaggggctggccaactacagtccaccagccaaacccactctccatgcccccactttatccttccctccctggttttttgtttttgtttttgtttttttgaggcaaagtctcattctgtcacccaggytggagtgcagtggtgtgatctcactgcaacctccgcctccccggttcaagtgattctccttcctcagcctcccaagtaactggtattagaggcgcacaccactacaccctgttaatgttggccaggctggtcttgaactcctggcctcaagtgatccacccgcstcgggctcccagagtactaggattacaggcatgagccaccacaccttgcccctccttggttttactagtaaaattgtattggaacacagctgtgctcatttgtttacgtatttctgaggctgctttccccctgaaacagcagagttgagaagttgcatcagaaaagctttgtgagaaaggctgctgtagagtattccttgtttacattctccaggccccatgccttggggaaaagtctgatgtgtcgccagaggtaggagagtagttaagaacataagcagttaagaacgtaagtgactcgactcaccatgcaaatgtggtctacaaaagtgacaacaaggccacctgtaccaattaaaaattaaacttttatgattttaggcagaactcaggtttttctttttgttgactcttgcattttgaaatgctggcctctggccgccctgcatattttaagtgcaaatctcactccatattcaatcctgtaatgcagaggtcttggttaaagaaaacaatgtattggggtcactcgggggcagaatactgccctctgctaggtgggcsccactggtctgaccaggttcaacttctgaagggcttttttttttttttttttaacagcaatactacaaaatccgcagtcaagcaattcatcagctgaaggtcaatggggaagacccatacccacacaagttccatgtagacatctcactcactgacttcatccaaaaatatagtcacctgcagcctggggatcacctgactgacatcaccttaaaggtggcaggtaggaactctccctggcaaatcactgaactcccacagcaggtaggcctgcggcttcagtagcacaagggaagrtctgggttggtcttgttctcaagtagcctgtgtctgaagctactttactaaggayagtgccattatatctatacagaaagaagcagagcagccctgagacatggaatcatattccagatgaggtagtgctacaaagagaggggctttctctataaggattcccttcatcagcaagaatcagcggtagaagtctcaggcttctaagaattccagtctttggcctaagaatgctttgcactgagacagtatttctagaacattgctcttttggagttgtagtatcttgggtgagatcttcttttcctaaatttaaaaaacaaaaaaaaaaaatcacatcttttccttgccctctcccaccaaatagtaaaactatcagttgtagaaaatttagaatagtcaaagaagcacagagagaaggttttgattacgcataatcctaccacccagagagaatttctggcaggacctaaatgcccaaaagatttcttctttaaagtgcagtgattttactaaaatctttttttttttttttttttttgagatatagtctcactctgtctcccaggctggaatgcagtggtgccatctcagcttactgcaacctctgccccccaggttcaagcaattctcttgcctcagcctcscgagtacctgggattacaggcacctgccaccacgcccggctaagttttgtatttttagtagagatggggcttcgccatattgaccaggctggtctcgaactcctgacctcaggtgatccacctscctcggcttcccaaagtgctgggattacaggcgtgagccgccacaccctgccactaaaatatttattgatgttagttattctagttcagtattctcagatacacagtgtgctctgagatcttttcacatctgtgtattcagatttttttttatttttttatttttatttttttgaggcgaagtcttgctcttgtcccccaggctgtagtgcaatggcgcaatctcggctcactgcaacctccrccttccgggttcaagcgattctcctgcctcagcctccccagtagctgggattrcaggcgcctgccaccacgcccagctaatttttgtatctttagtagagacggagtttcaccatgttggccaggctggtcttgaactcctgacctcaggtgatccacctgccacggccttccaaagtgctgggattacaggcatgagccgctgctcccagcagatcttttttattttaattgtttgtttttattctgtttcttgctttacatttcctttgggacttttatctgcatactggatcatcttgattcttttcgataattgtcactttatctcaaatcctttttatctttctttatactttgatttttaaattttatcctccttttcactttctgtttctcttaaggcattatttgttgtatttagtcactattatttccttatagcttagtctgcattttctgaaagattttttactttatttctaattctttcatgtgttatcacctcatttcttagtttttctagttctaatttgtgttctttcatgttttgcgtctttttcttcatgtctttcagctcatttttgaatagtaagttagaattttttgcttttcacggcacgtactcactcataagtgagagttgaacaataagaacacatggacacagggaggggaacatcacacactggggcctgtcaaggggcggggggaccggggagggacagggttaggacaaatacctaatgcatgcagagcttaaaacctagatgacaggttgataggtacagcaaaccaccatggcacatgtatacctatatgacaaatctgcgtgttctgcacatgtgtcccagaacttaaagtaaaataaaaaaaaaaaaaggaactttttgtttttctaagcatgtctgtcttgagtgcttttattttgtctagaggggtgttattctccttctatctctccatttttagttttttaagtaactttatatggtatgtgagcccagtgcttttatgttgcttacatttacatgaaatcagttttcctgaatgttcaaaggaagcacggtttcgtttttccagtgagctccctcttgtttttgtggcatgttcagaaatactgcagcttgttttttgagatttcctggttctcttcttcttcctcactttttttgggtcttctttttttttttttttttggtctcttttttccttgtcctgttagtttttacggtcttgtcctagaagggagcctggctgttgagagggtttctgtgggctctactcctcattccctttagattttttttttttttttttgagactgagttttgctcttattgcccaggctggagtgcaatgccgtgwtctcagctcactgcaacctcygcctcccrggttcaagcgattctsctgcctcagcctcccaagtagctgggakyacaggcatgcrccaccacgcctggctaattctgtatttttttttagtagagacagggtttctccatgttggtcaggctggtcttgaactcccagccttacgtgatctgcctgcctcggcctcccaaagtcctgggattacaagcgtgagccacagcacctggcctcctttagatcttcttaatgcaaccctcacctgtatggaaacggacacatcccctccctgtttcagctgctctcccccagtgagcctggaggaaaaggttcacattttccagaggatacctttggccatttgggggctttccagttctcagatccctcccataccccatttctccccactgctttttccccgtatagaggtcttatggctcttggtggtttgcctccttgcttatatttgggggtccttggcaacgtcttcccacagcattttgttgtaaattttgtccatggatttttcgcttcgcctctctagctgtgctttctatttttrtgtgaggattcagggaaatccaaaaactatgctgctaccagcaccaccatcttctaggcatccagtgacttaatcttgaaagctagatcctgaaagcatgtctttaactggtttgaatggacattgttggtttgagggaaaagatggggattaaacctcaagctaaaatcagattgtactgctttgcattgtgccctgaccaaaaaaaaaaaaaaaatgcaggccgggtgtgggggctcacacctgtaatcccagcactttgggaggctgaggtgggtggatcacttcagcccaggagttcaagaccagcctgggcaacatggtgaaaccccctctctactttaaaaaaaaaaagaaaaattagccgagtgtggtggtgtgcacctgtaatcccagctactcaggaggctgaaacaggagagtcacttgaacctgggaggcggaggttgcattgagctgagatcgtgccactgcactccagcctgggcaacagagcaagactctgtcccaaaaaaaacaaaaaaaaaaatgcagagggagtttttttttgacactgataccataaaatgacttctggttctgtcagtcagtatttttgctcttctttttctaggtaggatccatgccaaaagagcttctgggggaaagctcatcttctatgatcttcgaggagagggggtgaagttgcaagtcatggccaattccaggtatctcgaaatacccagttatagacctttcttggttggcctagagcaacacagcaataggctgatgtggtcttactggtatttgaagttagagtaagaaggagtgggacatggttggggaaggctgagaagaggataatgtggccacctggtcacctgtaaagtaatgactactctcaagttatatgacagtaaagtaaaggatagtccttttttaatagtgkcccctgaatctgacgtccttcttgggctcacattaactaggtattaacagttgagtgagggttccagaggagaccagtggtcagtgttcatttgaattgttgttactgaattacatttctttttcactcagaaattataaatcagaagaagaatttattcatattaataacaaactgcgtcggggagacataattggagttcaggggaatcctggtaaaaccaagaagggtgagctgagcatcattccgtatgagatcacactgctgtctccctgtttgcatatgttacctcatcttcactttggcctcaaagacaaggtaagcgttcttggcctcctagctgtggcctcctagctttctgtttgttttatcatacctttggatcagacataccagtgatttctaactgctgcttttggtttaggaaacaaggtatcgccagagatacttggacttgatcctgaatgactttgtgaggcagaaatttatcatccgctctaagatcatcacatatataagaagtttcttagatgagctgggattcctagaggtaaggagagttccttgcctgacgtgatgagctgccttgcaatgcttgcctcctcctctcccttgccttccttttccaaagcgtatcctgtgtcaggatccttcatgcctaatgagaatgtccccttttcttgccatcgtctctgttctaccttgtcctgattaggaaggcaggacctgacttccaagataatggacaaggtatagggccatccacatgctaatgatgtcacattcaatatgtattcacgtcattttgcttttttgtagcattaagaaatattttttgattatatgagaaaggcaaacacaygtaccataaaacaaattcaaacaataaattaaatagaagcaaaactgaaagtgctctttcactccttctgactaacttccctacccaaacttgagtttgatatgtatccttccacaccatttactgggcatatatacgtatgtacatatgcatgttgcagatggagtgcacatatgtaaacattttggaggagttttatttttggtttaaatatgaatgaagtcacactatgtgtattgtgatggacctgcttttatttcacttaagatattctggatctctttgtatgagatagatagatactctttcttaatgctgcattatttgttccaacaagcatctttatacacatgttcaaatgtttctgtaggatggatttctagaagtagaataagtcaaacaatataagcagttaaaattttttttaaacaatcagttgagataactcactaccttcagaccagcctaaatttttaataaatactgggaattgggccgggcgcagtggctcacacctgtaatcccagcactttgggaggccgaggtragcagatcacaaggtcagsagatcgagaccatcctggctaacacagtgaaaccctgtctctactaaaaacacaaaaaattagccaggcgtggtgrcaggcacctgtagtcccagctactttggagtctgagtcaggagaatggtgtgaacccaggaggcggagcttgccatgagccgagatcgcgctgctgcactccagcctgggcaacagagcaagactccgtcttaaaaaaaattaaataaatactgcaaattgaactcaagaaaggctatatccatttagattctaatttacagcttgtgaaagttcgtggtactatattaatgatattaggtattaatagaaattgagacactgtcgtagaaaatcatagtgtccttttttgtcaagcacttgcacattactgttgaacttattaacatttagtttggggtataacaggcttagactatattacatgcaaagcatggtctgtccccaaggcctctggttatctaaggactgatgtttctccctgccttttttagattgaaactcccatgatgaacatcatcccagggggagccgtggccaagcctttcatcacttatcacaacgagctggacatgaacttatatatgagaattgctccagaactctatcataaggtagtcagtaatagtacacccttttcccttaaagaagcagaaagctggaataccactggctagatgggtatagtcagaaataagaggaacagagagagtaaagcagccaagaaagtrttctgatgggtcaggtgtgtggatgtgagtaacacttccagaatttctctacaagattaatagagcattgtagggcagagaccaaaggggttgtctttcccatgtatacaggcactccttacctactttggttcccctaaaacttttaagataaagtcttacrtggattagatctgatttaagtctttcacagaagaaagagcctaatctgtctgtggaagttggaaataagcatcttcaggcctggcgcgggcctcacacctgtaatcccagcgctttgggaggccaaggcggatggatcacttgaggtcaagagtttgaaaccaacctggccaacatggtgaaacccagtgtctacaaaaatacaaaaattagctgggcgtggtggcatgtgcctgtaatcccagctacttgggagkytgaggcaggaggattgcttgaacccgggaggcggaggttgcagtgagccgagatcctgcaactgcactccagcctgggtgacagaatgagacttcgtctcaaaaaaaaaaaaaaaaaaaagtatcttcaaatcactataaagatgtcttgtcaaattcccaggtaaatattgaagattattattcaggattcttagttgcagacaacagaaactgttataactagtttaagcaaaataaaaatttattcagctctataggtgaggtattgctcctcacaagagggcattakctgcgggggtctgcctgcagaccstracctaaacgatggatgaataaaacgtacactgaaacacagatactctgttttgccagtcctgctgagtgtccgatcacctgcacaccaagagaggtgtatttgtcattgcggccgaccctgagcagctctcactccaggcatttatttagtatagaattaacaacagaagctttgagtaaacacacttgtggataattaacatsgtaagagaggagttctaggaattattaaagtccaggtaccatggtctaaagtaaataccattagggagcagtatctttggtcaacctccccccaagagggccatctggctgaaaggttagttaatggaggtagggtaaacagacttaactggggaagcctctattttccgtagtatttaccctatgacctaatgctgtacggtaagaactggctgccttcagcctgttcagttattacaagctacgtaacctttcggccttccaaaaggtttgtgactattccttataaytttccccaatatttccctttaatatttctgccaccatcctgagtgaatcccaacatagaggaagctcacagtccccaggaggatcagagaatcaggcttggaaactatacaactaggaatgattctgagtcatattagaatgggctgttctcatggagaacccagtgtattttcctagtaggcacagttactacagctcataatcctggcactaggcacaagtcattgccgctaggacctctgcaatctaaaagctacgtgtgactggcccccttcaccagaatgaattctatgcaatacccacatcttttgttagtagtttccatgctgaagtctcacaagtgtatctgactggtggagcttgggtcacacgcctgcagcctaaccccaagagaggctgcttccttggggaggttcagactcaatgatgggggatgcccaagacaggaagagtatcgagaagtcctaggcagccaaaaaaggggtaactatccacactacaagggtataaagagagcagggtgcttggcaatttgaccagagacctgagagtatacctaacctgtgaaaaccaagttacggcttttggagactgaaacttcccagagctgttaatacaagattagctgtcatggggccgggcgcggtggctcatgcctgtaatcccagcactttgggaggcggaggcaggcagatcacctgaggtcgggagttcgagaccagcctgaccaatacagagaaaccctgtctctactaaaaatacraaaaaattagccrggcvtggtggcasatgcctgtaatcccagctactagggaggctggrgcaggagaattgcttgaacctaggaggcggaggttgyggtgagctgagatcttgccattgcrctccagcctaggcaacaagagcaaaactccatctcaaaaaaaaaaagattagctgtcatgaccgtggccatgtgttgttgttagatgcttgtggttggtggcatcgaccgggtttatgaaattggacgccagttccggaatgaggggattgatttgacgcacaatcctgagttcaccacctgtgagttctacatggcctatgcagactatcacgatctcatggaaatcacggagaagatggtttcaggtgactcctgctctctctcatactcatcgggtggttggtatgctgctttcagaggagggctgcctggatttcattcccgctaaataacaggtttctytcccagggatggtgaagcatattacaggcagttacaaggtcacctaccacccagatggcccagagggccargcctacgatgttgacttcaccccacccttccggcgaatcaacatggtagaagagcttgagaaagccctggggatgaagctgccagaaacgaacctctttgaaactgaaggtaaagtgacaacactcactcctccgttgtaaggccctccttcctgttcagctctgaatttgattgggtcagagctagaatttcccacactattctctttatgtacatttttacttggctagtgtgatgtctcctgccctaacttttgcatttgtgtcccagaaactcgcaaaattcttgatgatatctgtgtggcaaaagctgttgaatgccctccacctcggaccacagccaggctccttgacaaggtgagaaggccctgccttcttgtacatgtcctcatctggtgctgaayggttccctcttccytgggaaaatgaaccccactggggagagttcatttctgcagcttcacaggaaaaccctagagagagaacaagagaattaacagacttttaactgtcatactaagctctgtgccaaataatttatgtgtgtgatctcagttaatcccgtccagcttttaaaaagctatagggtagggtgggcatggtggctcacacctgtaatcccagcacttcaggaggccgaggcagatgaatcacctgaggtcaggagttcgaaaccagcctggccaacatggtgaaaccctgtctctacaaaaaatccaaaaatgagctgggtatggtggcgggcacctgtaatccccgctattcaggaggctgaggcacgagaatcactggaaccaggatgcggaggttgcagcaagccgagatcatgccactgcactccrgcctgggcgacagagcgagactccatctcaataataataataataataataataaataaataaaaagctataggataaacccatctggatgggagctgagatcttctgtctgggctgggacgatcaaatactattcagaaatggtgactgactctgctttgctttctcattaagcttgttggggagttcctggaagtgacttgcatcaatcctacattcatctgtgatcacccacagataatgagccctttggctaaatggtaagattccagttacctattgctgcataacagccccaaaacttagtggtgttaacaatttattgtcaagattttgtggtttgactggtggtctttctgctgggtggtgttgaccagggtaacccaagtggctttttttcaactggggattctgccagggcactttggttctcctccacgtggtcactccacatacgatcttatcctccagggcctcttcatgtggcctgtctggcagcacagcctgggcttsccttcagcatggtggttgggctctaaggggaagcttccaaaagaacagacctcattgtgcaaacacgtatcaagcctctggtgataacccattggccaaaccaagacatgttgccagcgcagagtccaggtgaaggagactacacatgggcatgaatgcaagaggtgtggtccattttaacagtctgcccgctggcctgttaggaagatcattaaaccttcctggtctctctcaccctcctcaccgttgtaccaaatgatttgttgctgagactgcatgcaggcttctgactgcaatcagtaacacttttgagtccactagaattcaattattgtattagatgtttgatcgttagaccaacctggccaatatggcgaaaccctgtctctactaaaaatacaaaaattagccaggcatagtggcatgggcctgtgatcccggctactcaaggctgaggcaggagaagtgcttgaacccaggagacagaggttgcagtgagccgagatcacaccactgcactccagcctgcgtgacagagcgagactccgtctcaaaaaaaaagaaaaaacaaaatttagctcattaggggcctctatattcagcctcctctttggtctcctgtccctaggcaccgctctaaagagggtctgactgagcgctttgagctgtttgtcatgaagaaagagatatgcaatgcgtatactgagctgaatgatcccatgcggcagcggcagctttttgaagaacaggccaaggtgagaaaggggactgtgagcagaagctgtgccaactcaccaggaaataccagccttaaccctgatctgtgtcagcgtatacgttcttggtgacttcagaagtgaaagataaagccataggcttgctggaggagtcacatttcaagatggtgacttcatctggtattgagtctgtcgtacataagaggaacttcattattaatctcygtayggaaagcgtgacgcttgccttgaaaatacacttgccaagcaagaacattattttcttagattgtacatgtattaaggtggcttagggctgggaggtaggtagagatgaatggagaagacagaacccccacaggctgcctgcagcaggtgttgacagggctgttttcaggaaatgggagaaagactcttgtaattgtcacagtctctgagaattaacctgtttggagtcccagagccccaagcagcagaagggttttctttcagagaaatttgtatgtgttctgaggtcgatttcatcagtcctgacctccaggtctttgaaagaaacggctgcatcttggagttactaggaaatgaattcccagcaagtcctgagtgtcaggagcatctctggaatgatggtactcccacctcggagcctggtaacatgttcactcacacactgagatatcttagaagaaggtcaccttttggttctctttcctcttctaggccaaggctgcaggtgatgatgaggccatgttcatagatgaaaacttctgtactgccctggaatatgggctgccccccacagctggctggggcatgggcattgatcgagtcgccatgtttctcacggactccaacaacatcaaggtacgtagcaaccctccacagagcacacttcctgaggaagctgcattgtgttggagccagggcatggtgggcctggaggataaaattaaggaagggctttgggctgggaagaggagcaggcagaggagttccatgccactcacaggagggccagagcctctgaccttaaaggatttgggttttttcctaccaggggcagaaggaatactaattgtttgcatttcttgaggatccagggaagtctccgtgcattatttcagctaattaagtcagccttatgaggtgtagaaactgttgtttcccatttttatagatgaggaaatcaaattttcatagaaatgcgtctattcatccttttgacatagtgccctaggcagtgctatgcatttgttctttgtcatctgtaacttgagagggtctgagttgaaataaaagaacacatgagccttttcagctggaatatactaatctctggattttggtggtaacaacagaggcaagaggaatgggtagatagctgtgaaaaaatgttgagagtgcttctcagcttcaagrtacattcttatctcccacaggaagtacttctgtttcctgccatgaaacccgaagacaagaaggagaatgtagcaaccactgatacactggaaagcacaacagttggcasttctgtctagaaaataataattgcaagttgtataastcaggcrtcttygcatttctgcgaaagatcaargtctgcaagggaattcttgtgtgctgctttccatttgacaccgcagttctgttcagccatcagaagagagacaaggaattaaaaatttctttttaatcctgttaccaaataagccatttgtctcttctctttacttttagaatatcaacttttttccccagacttctggcctaatgaatgtttaggattttaccatcttattcatttaacaaatttgtattaatgtctgccctgtgccaggcattattctaagagattggggacacagcagggaacaaaagccaagttcctgcttttgtggaaattgtattctttctttggggtagggagaagaagtagacaaacaaaaaaacaagtaaatacatgttctttctggtggtggtatatactaagaagaaaaatggagcagggtaaggggacagaggtgctattttagaggtggaaggaacagtgctactttatggtggtcaggaagacctctgctgggcatttcagtagaggtctggagactgagctggggaggtctgtgggaaaaggccattcagactaaaggaccatgtttttgaggaatggcagagggtctggtgtgactggacagggatgagtgaaggtcagtgaggggccagatcacgcaggcccctggaagccactcagaaaagtatgtgttttctgagggaaatgagataccatggaaggattttgagcagaggagtgtttttcaaggattattctagtttctgtgtggaggacaagagcaacgaagggagaccagctgagcattcaccatgggctgaggagacagtggctgcgacgtgcatggaccagtggaaatggttacaagtggttgtactttgcctgtgttcctgagggcagaagaatttggtgatgggaatgtgggttgtgagaaaaagaagccaaaaatgatttcaaggttttggacctgaacagctggaagaaagttgccctctactgagatgggaaaaacaggaagttcaggtttcagagggaaggttggaagtttggttttggacatgttaaatttgacatgcctgttagccagatggaaatagcagaatgttgaataatgaatctgaagttttctcattattttcagctccattcaatagagctaagaacgtgacaagggtgtggctgagagcctgccatcaaagtggagcccctctttcctgacacggagacagctgggaagaccttttttcacatgacggaagactttaccttctgcacctcagcaaaacctctgcaagcatcccagtttgggagcagccagtctcctttcacagagcaggtttctgtttctgtagctggtaaaacaacctaagcattcagaattgcctaaatgaactacctcaggcagtgaggaacatccctacccctgctggtgtttaagcagtacgtgaccaggtggcatttcagaagaaacattttcaaatggcacatcctcagaaagggagtggtaactaaaacgggagataatcatctcaccaagggaggtggtggaaggtcaaggacaggtaagggactaggtttcaggtaatactgtcaatgcagacaattgaaaaaggctacaaggattgatgatatgagtgactttacaaagtggtttaatggaaggatggaggcagaatccagctgtctggtcttaaggaggctagggatagaaaggaactgaggcagcagtagacaacttgtatgtgagggttggcrggaaaaatgaccgagtgtgaaagctagaagggacagaagggtcataaagtccccatttctcttcaaacagttgcaggctcacaatttgctaactgctttgctggggtgagcagaaacaggcgtggtctcaaacttcatcaagcatctacacttgtaaagaaaatagatagtaataaatcatcctccaaaattgtataaaatggcagctcaggtaaatggtttgaaggagaggtccacggggtgttgagaagctataatggacatggacctagttagaggaggtttctctgaggacatgagatctgaagggaagaaggctttccgtggtatggcaacaagtgcaaaagccctgtggtaggaagggacatggagaccagtgagagtatagaagcccaaagaaatatggcaccaggtgaggcaggaaggggctggccatgcaggactgtgagcactactatgggatttttgtctgtattttaagagtactgggaagccagtcgggcatggtggctcacgcctgtaatcccagcactttgggaggtcaaggcaggcggatcacttgaggtctggagtttgagaccagactgaccaacagggtgaaaccccgtctctactaaaaatacaaaaatcagccgggtgttgtggcatgtgcctgtaatcccagctactggggaggctgaggtagaattgcttgcccctgggaggcggaggttgcagtgagccgagattgtgccactgcgttacagcctgggtaggagagtgagactccatctcaaaaaaaaaaaaagtaccgagaaggcattcactgaagtattatttaagcagtaaatgtgtagtagtcacaaatctgacaccagatttgcagtttgaaaagattagtcttgctgctctgtggaaaatgaattggagttaagcaagaaaaggtggaaattcagagatgagtgtagcaatccaagaggaatacgatagtggcttttactagcgtattggcatgcaagtggagagaaatggatggattcaagagataggaagtaagatcaacaggacttggtaatggattgcactaaggggattaagggaagggagataacaaggaacatgactcactttttagttacgcaactagattgctagtaataccaatccctgagataaagaaccctagaagaaggtctttgataccccttacccccactggaatatttcttaaaagacagaagaggcagtcacttgcagattaaagatattggagaggaatgaggagcaaagtctttggccttggaggagggccatgtcccatttcctttgaactagagagaaggatggggttgagcaagttgcataaatttttgaggggtaacaaagaaaaatgaattctttcatttttagtaatagagcattcagttactgggtgacaaaggcccctgaagtatccaggcagctatattacttattcccggcaatccaaaggtttttagacctgttctgcccactacactgtagtagtactgtactacagtagccagtagccacatgtgactatccagcatctgaaatgtggctgatccaaattgggatgtattctaagtgtaacacacaccagatttcttaaacttcgcattaaaaacagaacagaacataagtattttttaaaatattgagactcggcagccaggtgcggtggctcacgcctgtaatccagcactttgggaggccgaggcgggcagatcacgaggtcaggagatcgagaccatcctggctaacatggtgaaaccccgtatctactaaaaatacaaaaattagcctgacgtggtggcaggcacctgtagtcccagctactcgcgaggctgaggcaggagaatggcgtgaacctgggaggcggagcttgcagtgagcagagattgcgccactgcactccagcctgggtgacagagcgagactccgtctcaaaaaaaaaaaaaaaaaaaaaaaaaatatatatatatatatatatgagacagacagaccgaccccgggcatcgtgactcacgcctgtaatcccagcactctgggaggttgaggcgggcggatcacttgaggtcaggagttcgagaccagcctggtaacatggcgaaaccccgtctctactaaaaataacaaaaatgagccgggtgtgatggcrggcgcctgtaatcccagctacttgggaggctgaggcaggagaatcgcttgaagccaggagacggaggttgcagtgcgccgaaattgcgccgcttccagcctgggcgacaaagcgagactccatctcaaaaaattttttgattatatgttgaaataatactatttgggatgtatgggttaaataaaatatatatgattgtttctattttgacttttaatgaggctactggaaatttttaaattacgtatatggttcgaattatatatctattggacagtgatgttacagatagaaatacagcatagtcaggagaatcgcttgaaccgggaggcgaaggttgcagtgagccgagatcgcgcctctacactccagcctgagcaacagagcaagactccgtctcaaaaaaaaaaaagaaaaagaaaaaaattcagccgagtgctgcaagatacgtcattctagttgaaggaatatctaagccaacaagcggctcccatcatccggtttcacgcctctctaagacgcagccagggctgcgggacttgaagcgcgggaatctcggccctggcaccgactccccggaaaaactacagggcccsgcatgcactgcgcgcctctgggagcgggagccgaaaggaaccggcgctttgtgacgtcacgtccgccttaccggcggattaagctcgctttcttctaggcgcgtttcctgaaggtgggaggggagcgtccgcgaggcgctggggcgacggggcaggtttatccgggctaactttgccgagtctgtttttgagggaagaggttgtgaggatcgtatcttccgggacgcgtttcacgtgggaaggcgctccacgcctggaactgtcagcagccggcgcctgaagagctcctggcgcggggcctctggcctggcagccgcaggacccaatggatcaggcgctcacgctgttctcactgcatggcttcagtgccttgcctggcacctcctatcctgtaactggccgactcggggtcccacccaggcttctccagcggccgggaaggggctctgcttccggaagtgtttaggaagggagccagcgtaaaccagagtcccttcctccaagcatcgctgaagccttttctcccctggcagccgacttccttttctttggaaaggacgtcagtttttttagcttgttgaaactgttcagagatgcggtcttgtgggcaaataaatgcctgtttagctgagctgttattttcagctaagaagttcttcaagttttcaagatctaggagggggtgtaggctcgaattataatggacccagtgtagcaaaacatttattcatttaaacaattgtgcatgctcattcagacgcactacctgagtgagatgatgccgttctgggctgcttcatcttaaagagagtcactgtttcttctggcaacttctacctgccttgcctatcgaggtttgtgaattgcacctctggtttaatttcaggtcgatggccaggtggtcttcataaactatactgccttgtgatgcctccctagaaatgagaggtgagtcccttccaaacgaggattctaggatctcatgctttcttttcttgacaaggcttgccctggccctctgactttcaagtcacagggtctcacttcctgcagatttttgttttaaatcactgtggtctgatttaccagtagcattcactacagtagcgagcctgcacgttgcgctgcaggggattcataacaataccatctttcaaaagctgcatgcactggagctcaggaaagccttttttgtttttttgagagggagtctcgctctgtcacccagcctggagtgcagtggcacaatctcggctcattgcgacctccgcctcccgggttcaagcgattctcctgcctcagcctcccgagtagctgggactacaggcacgcgccatcacgcccggctaatttttttgtattttcagtagagacagggtttcaccacgttggccaggctggcctcgaactcctgacctcaggtgagccaccgcgcccggccttcagtttggttttacagtgcttagctatgtctatcacaagctcatcttctactgggaagctttttgtataattgagtccaaatgagatcaggatgtgcctagtgagcattgatagggccaagagtgagagatttccctgcaaagtatcctagggatctgcttgatggttttttaattcatggctttctatgcccattacagccctccccctttcacccccaccaccaggtagctcaaggcaaattaaccaggaaaatcatcaaatgttatttt

SEQ ID NO: 94986 - DNA, 66313 bp, Homo sapiens
  misc_feature (1)...(66313): n = A,T,C or G
attaaaataagaatgttagagagtccttttagaaaggcagtcttgggaatttggaaaaggatttttaaagcagctttcatcagctagactgttctccagcctttctttacttcctctttgaaaggacatagccctggtttctttttgacacaaaggaaagctatgcaaatcatgatctgtatgtagaattggtcacaagtatgttgttgcataggctgtacagttgggaagtagaaaccaaatgctacccagagacctaacccaattaagctctttgtatttctccttcaagaaataaatcttccttccttctttcttcctctttcttttaattttaaaaaaattcatcctgatttttttattttctatcttatttaaaaaataaaaataggccaggcgcggtggctcacacctttaatcccaacactttgggaggcgggtggatcacttgatatcaggagtttgagaccagcctggccaacatagggaaaccctgtctctactaaaaatacaaaaattagccaggcctggtggcacgcgcctgtaatcccagctacttgggaggctgaggcaggagaatcacttgaacctgggaggtggaggttgcagtgagtcaagatcgtgtcactgcactccagcctaggtgacagagtgagactccaactaaaagaaaataaataaataaatatataaatatataaataaataataaaagtaaactattgctgatgactccagggtcaatctggaaaaattaacagtattcctcaactccattactttctgcagccaagcttgattccttgaattatagttttctaagaaaaaatagtttttaataatctaaggtaaatttgttgcaattattagcagcagcataataaggctttttgcgcaaatgaatgttattagctagagttattcaaaaaagaatgaagcacaatttttgctaggacttcttgagaactattcataaaaatgcttttagataataaacaagtataaatgtcaaaatatttttttaaaagtataattggccaggtgctggctcacgcctataatcccagcactctaggagactgaggcaggaggatcacttgagctcgggagtttgaggctgcagtgattcatgattgcaccactgccttccagcagcctgatgacagagtgggactccatctctttacatatgtatatcttactctcttgatgggacaagttggtagaaataaagattttttttttctgttgtgatttcggtgtctgaccaattttctgactcattgtgaaggtgaccagatatgaaggcatatatatgactactcctctgtcccttaggtgtataagacttagctggaatccaactaaagatttgggctggtctctccatcttaacgttgatgggattcaggacacataaccccaaaatattgcaccctgttatttgagaaaactgcagaagcaaggtttctcataccttccccttaccccttctcccctgaagcaggccataaaccctaagtgactgttccctgaagtagatcataaaaccttcattccataggtaccctttatcctcacagatacagagacaccaagaagaatctggacaaataggacttgctaagttctccacagtttattaccattagattatgtccttttgtcctctgattatacttctgcataagactgtacataaaaatacacaagttttcctatttcttttttgtcttcatttctgaagattcctgtcatgtaaaacttacagtaaataaatgtgtgtgcttttctcaataatctgtctttcgttataggtgcctcatttgtgaacctagtgatgggtgaagaaagaaagctcttctccactacagtgctctaagaaaagctattcccaaaagagttgatccatattagctttagctcgggttcttagaattcctcaaacttgaggcattcatgatataatccaggtgccctgacacttgtttttctgttcattctgacatggacttcatggaaatgatgtgcagggacatcagactgaggtgaagagctcctaattgctccttgtaatcagagtttctgagtcctcatttcaatagtttgcagtagcacccaccataggtaggaccttgtatgggttactagatggtggcttaattgaattttttaaagcacaggtgacatcatattttaagaagtttaaaggtctaacagggtgtctgcattggtttaatatatgttaaaattcaaaggaggagtctgttttggggaaaggaggagaaggaaattagaaattcatttctccgcagtcccaagactgagctaaatcactgtggtgggagaggaagggtcgcaggaagtctaaccctgtgtctcaaatatttcacagcatgtttgcctacacaaaatatctgatgttagggtcagctggggctgctccatagcatagtaaaggaattggacatccagttacaattaatctgcacctccattaaggactcacatggagggctttcaaactctgaagtgtgtaagaatcccctgaagtgcttgctgaaaatgcagattccacgatttcctctctcttcccttactctcccctttctatatgtataggataaggccaggattttgtatttttaacagacaagccagatttttctcatgcagataagtcaggatctagcctttaagaaagacaaataaactcatcaaaaagtagggaatatagattgtgaactctgtactttatgagtgccattatagcagaattcatcaaagcgcatctttgactgcctcaacctgatctcaccttaatgaactgatccactcctccccactcaaagctacatatgccaaattaaacatgagatgattgtcatgtcttctgttggcaaaacaagtatttgtctttcatgtattgctatcatttttattactgccactgtttttcccctgggttctgtttttaatccaaatatatttatttctaaccagtgccttgccatcttacacacagccccctctctagtactgtgttttctcagctggctaatcactaagctttaccgaggtcatcaataactaatgacaaagaatggaacccctaaactccaaccaaggtgtaaaacctcgctcagtaccatcaagtatatcaggtaatctctccgttccatctttttctcggagacatctgtcctggagtcctctgatgcctaactccgttttggagtgattactctgtagacctgtcacaccctgcttcacattaccttgtagcaattcctggatgtaatgttttccactttctatccaactcttactctatgggacttggctcagacatagtcttctctgggaagccctccctggctctgctcgtctgggctacgtgcccactagtgcttcccctagatccctgggctctttcctgtcagagcacttacactatgttgtgatggttttcaaaaattgttaaataaatgaatgtataattacattaattaaaatgaaaagccattagacatagaatcagaacttatctgtagctgtgtaagttatttattctccaatcccagcaggacatgatggcttatgcctgtaattccaatactttgggaggctgaggccagaggatggcttatgcctgggagttaaaggctgcagtgagctgtgatgatgccactgcactccagcttggatgacacagcaagactctgtctctaaaaaaaaacattaagtcaggtgcaggggttcacgtctgtaatcccagcactttgggaggctgaagtgggaggattgcttgagcctaggagttcaagttcagcctgggcaacatgacgagacctcatctctactaaaaaatttttaaagtagccgggtgtggtggtgtgtgcctgtagtcccagctactcaggaggctgagatgggaggatcgctttagcccaggaggttgaggcttcagtgagccatttttgtgccactgcactccagcctggatgacagagaacctgtctcaaaaaaaaaattaaataataaaataatattttaatatcccctgtgtgtattctctccttttagaaggaatccctaaagtttagtgaaagatgtattcaactttaaatattttcaagcccctcaaagtaattttaatccagtcaaggaactgttaacactttcttaccccttcagaagtctctcataccttaggaaagaactgaaacacttcttaaatctgccttcacaactggttcaatggaagtaacatagaaagtttgttgaaaaataaggcagtaaagatttccctttgtcttttattagctcccatttgtttatctaatgaccaactgctaacttccaagatcaatagagattgaaggcccaaggtactcataaacttagatacacaggagatattttcttcgaattcagtttcagagtctgcatgttataggaatagtgaaaacttagcctcaataaagctagggcctccacctaccttcctcctaggtttgcatatgaattccagaatagtttatataatgccacaatgccatctgtctatgctgacatatgctgaggtttcctatcagctgcccggtccgtaggcatcagtccacatggtttgctaccagcatgtttcctatcaacatgtcccctttggtctggcccagtctgtgctagcacctcatacacaggcaataattctgctgctactgcagtatgctggagcctggggacccttggaggttgtttaagcccatttatctaaagcagagggtctcaaactagcagcctgtggccacttcaaatatgcacatgtttttcaacctgcatgattatatcagttatttatcactgcttaacaaaccaccccaaaatttagtagtgtgaaatacaccattctatttgttcccaattctgtggctcagcagttcgggccagatttaactggtggttcttctgctggtcttgcctgggatcacacatgttctgcagtcacctggcagccagactgcctcattcacatgtctggcagttcctgtggggcttgcagggctgttgcctggacctctggaggccagcccagcttctctgcactgtggtctcaggctgcaagaatgggccctgtcctaaggcacaggcatgtttcaaactctgtgtcatgtttgctactagccaaagaaaaagaccctacctcttgatgggaggaacagcaaagtcacattcaaaggggcacacatacaaggataggaggaattggagcattttttgccatctaccacagggtggtttctctgtctctctcactctaattaccaatggttaaaaattggagcttcatcttatcttgaaaaatcagctagcctactttattcacttacacttcctccctcatctgttggcatttgagttgtgataatgcctaatttacaagattgtttttgtgaagttagatatggaaaaatctgacaaaagcagaaactcaatatatgttttctcctttctgaacaccactagtcatgaagctgctacctgccaatgaccaaggagagcggccaagatgaagaacaagggagtcatagaggaggtggctggagaataatcccttggtctgttttagaagtatagaggcattaggaaacaaaactcttaaagaatttataagaaaactaaacgtactttaagaaattaaaaggagcagtaggaaacatatcagtttgctctaagtgaaatatctcaggctctgaatggttcacccaagaacctgagctcattcctgggaggcacctgcagaaaactggttctggtcctggtccctgtcttcaggtggctgtgtgtaaacatcttaccccagtgtacacatctgcagctggtaaatgcctgggggttttctcactgctctccaggagactcagcactgccctgttccttcctagcctgagtcaggactgagcagagaatcctccaccacacacagcaggcactatctgccacagttcctttccccgatagcttcaaattytctgccttttgaaataagcctacttttaactggaataaataattggtcaatctctacctcaggtgaagaggaaccaagcctctggaaacacttaggaacaaactgtaaaaaccaaaggcaattgtgtaaccrgttaaataagcttgctggactttgtccctgtgtatgagttagacaattctttcagctagtttgagtgacgcactgaccagtgaagcgcagtgaagcagtgggaaccggaatatccaaagagtggtttgaaggagaaagaagcattgtggctttatatcctctgggcctgggtttcctgaagtcaccacacatagaggagagagaaaatggctgagttaaaggtaagaaaccatctgacaagtttgctatggcttcttcagccaaaatttatggaagtttctgagaacttcagggtatcagagttggaaaagacttagagaggccctggttcaaacccctgtgttcagaggcttccctgtggtgtctgtgggcacagctggagctgaagaacaagggaaaggtgataaaggaaagaaatgaagctcttattggtcatcccttgcctttgttcatttcaattattgtcttggaaatctgtagacatcctaagagctcccctccactacggacatgcacgtttctctctatgtctttttcccaacccctgctctgacaccttcccattgctgcagcctcatggaccacttccggtgaccagttagatatgcttgatctatttagttaattaaggctctgaatcagcccttggccagaagaagcacctcctctaggaaatcattccttctttttagtaatacgcaattgaaaagtatgtgtgggttatgtgctgttaggtgctaagcattttarctatgaattaactcataatcctcaaaataaatctggggtatagagagaggttcttgtttcaattagaaaagtaatgcttggagaractatgatttgcccaaggtcactgccaatagatgacttgattagaagcagggtatgtttgaatgcgaagtccaggctcaaaaaggggccttagtggctcctactaractggtatcttaaggcaaggaaaacagaatatgtccctaatatctaaaaccatgcctagtgcccaggccaggcttgaatcaatgctcaaygcatgcatgtgtaactgaacagaactgcccagaaccttggctcaggccaagtaggccagaccaccccacaacagacatcttccctgaatgcagggtttgagaagtgccctaatgccctctaactgatgctgagtttgaagaatccatcagttaaggggaggtgtttctgagtttgaagaatcaaacaccttcctaattggtaggaatcctgaaaacactccacaccggagtaaaagactttggttttttatctttatgcctgactaaaagttaactctcattctttcattcagcaaatattttgtgctagtgcatgacactgcagattaatatcgtagatgaactgagtctgggctaggtagagtcaaaaaaaaatttcctaaaggagcctgtacctaaactgagtcttcagagagaagttggaactggcaaagtgaggaaggacggggtctggagggaagagtgagtgcaaaggcacagcacatacagaatgcctgcatgctctagaatccaaaactgtgtcagccaaatttgagttgatggagggacagccaaactgagatacccaggcggtggttggatttatggatctggatttcaggggagtgggcagggctaggggaataraactgagggtcatgatgtcagtggtaggagttgaagtcttggaagaaagagtagatagaaactttgttttctgatgaacattctatgargaagttcagcagargttggaaacatctttaccatttataaataaattttatgtaaaatcctatcctgctgtcatgtttaagcaacttattatgcmcagcaccaggacatcaatgtwaattgcatgccagtctttgctctcagtttcaaaggcattcttccctgcctgctgtctaatctttacaaagaaaggttaactccagaggtcaggaatctgaacacagaaaaccagattgcatcatattcattctaatcaataaacattatataatttttaaaactgtttctcatcttttatttcttcattttaatgaatatgtcaacacaaagccgtaaatgaaatcacatttacacaaaagtacaactggggtaagaaaattcaaaagataaagtaataaaattaaatttaaaatgaaataccctatgtatttgagtaagttgcttagcttctcccaaccttggtttcctcatttctaaaacgaagaacttgcttaatattcaggctctgggccccaccaccaaatccttgattcactggctctgggtctgtatgtaacaagcttctggagtgattctaatgattagccagagacaggayctacyattctacgtaactgatttcctcttgctgctgtaaaaaattaccacaaatttattggcttaaaacaacacaaatgtattatcttgaagttgtggaggtcagaagtctgaaatcggtttcactgggctaaagtcgaggtgtcagtgtggctgtttcttctggagactctatgagagattgtgttttcctgccttttccatggattctgtttcctcttctagaggctacccacattccttggtttgtagcctcttcctcgatcttcaaaaaaatgtatctctgcttttgtaatcacgtcacattttctcctcttataagtcaaatctccctttgcctccctcttataatgacacttgtgattacatttaggatacacccaaataattaggatatctccccatcccaagatccttaattatatatgcaaaagtctgtttggctagaaaagrtaatactcacaggtttcaggggttaagccatacatatctttcagagtgagccattagccattattcagcctactgcgataatgtgcaagttccctttacaatctatgttctatgttcccatcaaggttaattagaaatattagactctttttccacagaaaaaaaaaatgtagcagtagtttcatctctaccctgacttctctctctttccttcatgcccagtaagaggaagtgaggtgcaccatctgttcatctcatcaggtgttacctagaatcagagtcaggagaaagcacctcataaaactactctgacaagtaaaccatatcctggggaccaggtgagaattaaaaagctgtatactcataagctgccaaagagctgatggtactgaagtcacatggagctcaggaatttattcttgcatttagaaagtatgcatataattctctcgaaaagaaatgaaatcatatttttctgtcggatcaaattattcagaaatccgaactgtagaaaacatacaaacacacttgcttaatgttagctttttaatcttatttttgtacacagtatacttttacataggcactgaaccagctggaratgaatgcttggattttcrcagctgataaaagcagagttcagattctgtccttgagctcaatgtctggagaaagcagctgtgaatactgcttccttaattcagatgcctttggccgtgaggggcatggcattttaaagctgcaataaactctgtactttttctctcaggggattagaaaaaccaattgatttgatagtgactcagcagttttcaccttcctctttagccaatgccctgcagctaagattgagaaacggattcagaactcacacctcttggtgcttggtggctcccttccaaaccatcagctgttctttctactttctttcctattttttaaagcacagtctgaatcaagtgcttcagaaccatttatactaactcgtgttccaaacacataaccctgaaccctcttctaaggccaccagttacaaagaatggggaaggttaatgagtaactccaccagtgcctgccagaaagctcagctgtactccagccttccttcctytyttgcagagagaaacaatgcggcagttgaacaaassgaaggcactgtaatgcccagtggcttcagtcacaggctggtctaaaattccatttcacagaattgaagataatttggggttattaccaattctcagcagctcaaattcaatcccgttgatggtgagcakggggttcattttgagagtagaaaattggatgcagtggagaatcagaatgttggatggtctctgccatttccccaaagatatcatcctaactgcatgctgctgcttttaacaaatcagkatacaacttagtattttttgtgttgacaaattttcaaatatacaaaatattgagtctgaaggcaaaaagaataatttttcacttccattgcttcctaggtcataacattcacatctgatatttcttccaaatacagactgttgttggcctgatcatcactcacacatccaggcttgttacatctccacgccactgagtatcagggaacctgccccaatattcacgtaggttcttttctattttccctaagcgtcggccaactttagaaataaagggacagagtacaaaagagagaaattttaaagccgggcatccgggggaggcatcacatttcggtaggttccgtgatgccccacaagccacaaaaaccagcaagtttgtattagggattttcaaatggggaggcagtgtgcaaataggtgtgggtcacagacatcaagtactttacaaggtaatagaatatcacaaggcaagtggaggcagggtgagatcacaggaccacaggaccgaggcgaaattaaaattgctaatgaagtttcgggcaccattgtcattgataacatcttatcaggagacagggtttttaggatcaactggtctgaccaaaatttattaggcgggaatttcctcttcctaataagcctgggagcgctgtgggagactggggtctatttcacccctgcagtctcgaccataagagacaggcgcacctggaggggggctgtttataagcctatacctcctggctcgtattctctttctcagggatgttccatgctgagaaaaagaattcagcgatatttctcccatttgcttttgaaagaagagaaatatggctctgttctgcctggctcaccagcagtcagagtttaaggttatctctcttattccctgaacaattgctgttatcctgttcttttttcaaggtgtccacatttcatgttgctcaaacacacatgctgtacaatttgtgcagttaatgcaattattacagggtcctgaggcaatatacatcctcctcagctgacaggattaagagattaaagtaaagacaggcataaatcacaaggatattgactggggaagtgataagtgtccatgaaatctttacaatttatgtttagagattgcagtaaagacaggcataagaaattacaaaagtattaatttggggaactaataaatgtccatgaaatcttcacaatccacgaacttctgccatggcttcagctgatccctccgtttggagtcccagacttcccgcaacaactgaraactctggagggcctacccttcacccacttccacccttcttatatctcttaaggagctgtgttcagatggttacatttcgcttgctgagcaagactgcattttcattatcctgggctaaaatcaattggtatttaagttagagcaaaaagggttctaaccytatttacagcagcacacatacacttacattagaattggctttaagggaaaaattcaatcaatcgacaaatttccactgattaccttytatgagccaagactgccatagtctcagccttcatgcagcttataggctagcaaaaaagccagacagtgcacaagaactcacaagtgtgttgagtgttgcaagagtaagtttcaggggctctccatgacttacctggttgagaaaccctttaactttttttttcctctgggtgtaaagtgaagagatggcaatcagagtaggttccattgtgtcattgtgaaaagatgctgggctggcgtgtctcctgaaggccacccatatctttaaactttattttcatgcattcgcacaaatatagatgtgttccatagatgaggcagatagcagaggcttctgcctacagcaaggctagtttggagagggttttgctgtcagggttggacccacacacctyttcatagatgctttttyttttttttcccagagtttgaaagggaaatggagtytcaagttcagggagrttacagtgtagacccacaaatcagctaagtacagctaagggtggagaagtytatgcaatatccagcactcttctgattaattagaagtctttaaaattcacagaaascatattgtcttccctaaatgattcatatgtcaagacacagtaaagatattatatgtggaacatcatacacaaacataggtccatatagaaattcttaccttagtaaactgccaattttctgaaatgctctttaaatcctgctaatggtggcatttgtgtctttgtcacctacagtacatttctggatttgggaatgagtgttcttcagaggatcctcgctgcccaggttcccygccagaaggacaggtatgagcaaataaagtgcttagaagagctctgawtcctattcctggatgactagctttcaggccaaagtgcctccacccaccgtggytcttccaatctagcctgtgaactgtctagaggtttcccaagtcataggggcaatgaagatacagagcaatgacaacacaaagattaaaattggattggtggcacagcagccaatccaaactagtraaattaactgtagggtttccagtaggatccccaaaaatccagrgttaaagagaatccctcatattccccttgaacaccatggatgtgagcattatgataaaataacaaggtgctttcacatgtatgcacaaagatgttcatactagtgctggttagaaaagcaacaacacgggaaacaaaaatattttcaaaactttttgcaggccgtatcatagcataaaaaaatcctcatttcttaaaaaaaaaaaggaaaaaatgcctgattattacagggttacaggtatgatagggtcacaattttggaggataagaatgcaaggaaaaataccaacatgtgaaygcttggttatttctggttgtgagataatgggtgwtatcatatagtttatacattttctacaataaatatatattacttttataatcggggggcaagtcacatcaaaagttgttacaagaaasatatcgggttgcagatggtcatgtgcagtcgcccagagcatccccatccccctactgagttggttggtgggaaggtgggatgcttttcggatgggagtaatattgtttattgcatcctttgtttcagaataatcctcaggtctgcccctacaatctctatgctgmgcagctctcaggatcgkctttcacttgtccayggagcaccaataagagaaggtacaaggattagatgaattctgacctgcagactgtgggtactatgacagggactttgtgctgcctccttcccctgggccacagcctcccagagctgcccaagatcctgcttcttataggctatggtctgggtcatggtcagaagagaatgaacttcctgccagctagcaccaagtgactggtggaagaaggtgaaggaaagctgcacagagctgggaaaatacacatgtccagttccatttacaaattacctcctatattcagaaggaaatattcctaatagtttggtcttcttctaaagactgtcctgttgagttttggcttggggtttacctgttttgttttgttttataatgactaagtcacaattatggaagattcagagcaatatctttctcagctgactagaggtatgttctttgcaagaaaatgttgggtaaacgaagtttggatagttaaaaagtcacatattatggcccactgtggtttgaattaataaggtttttactctggtattcgcctttgctagaaaccagcatattcatttacatactgtgccatgttccatgtttgctctaatcctacatccaggtcaatgaacgtaatcccttgattaactcatatcaggcaggttggatgcagtatgtgttatagttttgggaggcagtaagtgttatgatttaaacaaatagtgtctaattataaaaattttaggctgaggtatttgtgaagaggaatgctgctggtattagagactcggggagaagggcatgtggtcttgtactgcttagtagggcagcctgggtttatctccacaggtccttctgagaagcaaatgagatagtaagtaaaaaactataatggaccacacaaatgataaagattgcaaggtttaatcatggccaccctggaggcaggccccctaagtataaatcctggctccttttccagctgtgtggccttgggtaaatcatctgccctcttggatcctctagttcttcattcgtaaaacaaagataattatrgtacctatttcatagctgtggtgaggattaaaagaaaggatgtgtgtaaagcacattagcttagcttagcacattggcacaggcacatggttagtgctcagttaatgctagttattgtcatgataactatyattaagtattgccatcatagcagagtttctgcctcatttccagggtatctctaggaggctgtcaagagaactgggcatgatatgtggcaagtgctatgttacaatgtcagtatcaacagtacttttctctcaatagatatatgcgtgggaagaggaagagatakagaaagatttctatacatgtcaaaaatcaggggataattccttcactatttaatcatctctctctctctctctgtaagcccaaatagggtaagataagcacgcagataattctgtccattctaatttatgacaacctgtcctctatgactatgttcttgactttatggcccattccctaacaggccacctggtctccggattctgcagcctgtccccattattcagcaatatcttcagccagcaggagctgagctttgttccagcaggctgaaaaggagctgttggcatttcattaagaagctggcactgttccctgaatcagaattaaatctctgttcagggcaatgtagtactgcctggggagttttataaactcagctaaaaaataagggacactaggtatggctcacccatctatttagaagaactctccaaagatatccacaagaattttgtggaaatgcttcccacccaaaatctccagtgggaaaatgggaccagtcttatccataagtaggccagcctgaaattcttagttactactcatctgaaccatagcatacagggccaccacaaaactattaaagagtctatctacctacctacgtacctacctacctacctatcagggattaatttttatcagattagctagctgattgatcccttgggtcttgaaaaggcaaaagtctggagagataatttggaaaatgtggactgtgataaaaattcagaagattaagagaagaaaggcaatttaacaaacacatgataagccagcagctactgtatgccaggcatttttggtacacaaactctctgagttctcacaacaatcttaggtgacaaggatgaagaacataaggttcaggaagtctagtaactctcccaggatcacacaggtggttccaagacatacacacatgctctgaacttcatatactgggagctggagargcttagtaagaccaaggtctgargtcacgtcatcaagaratggagaaatcaaatggaaactaaacagatctagccctttttcccccagatggctcaatgttgggccaggccaactcaactcactgaggtagactgtccttggtcttgaaagggccagagcctgttgattcaggtctggtcttccgttgtccttctgtattttgtcagggcagtaccctctgaaaggacttgggtccctcttagtgagcttcaatgtcccttccagcttctggaaggtcttatcctggtgtcctttcagattcctttatcagagtcttcttcccttcctgaagcctgagatctggtcctggtagagaggacacactttaaaaagaaaagaaagaaagacaaataaaggcataaatgtactacaataaaacatggacatacactcttataattttagagtacagaagtgttaatttatttttattttattttaagttccagggtataggtgcaggatgcacaggtttgttacataggtaaatgtgtgccatggtggtttgctgcacttatcaacctatcacctaagtattaagcccagcatacattagccatttttttaatgctctccctcccccaactcccaccccccaacaggccccagtgtgtgttattcccctcactgtgtccatgtgttctcattgttcagctcccacttatgagtgagaacatgcagtgtttggttttctgttcctgctttagttcgctgagaatattggcttccagttccatccatgtccctgcaaaggtcatgatctcattcctttttatggctgcatagtattccatggtgtatatgtaccacattttctttatccagtctatcattgatgggcatttgggttgattctatgtctttgcattgtgaatagtgctgcaataaacatacgtgtgcatgtatcttcataacagattgatttatattcctttgggtatacacccagtaatgggattgctgggtcaaatggtatttctcattgtaggtctttgaggaatcaccacactgccttccacaatggttgaactaatttacattcccaccaacagtgtaaaagcattcttatctctccacagcctttccagaatctttttctcttataaattaatatcaaaaagacaaacccaatagaaaatgataaaggacttctacaagtaattcacagaaaaactataaagagccaataaacaaatagacttgttttttggaaatattttgtattttctaattcataataaaggaaatacaaaataaaatgagatactatttttcacctaaaacactaaaatttttaataatactccagatttgtgaagatgtgggtgaccaggcactctcacacgttgttagtatgataataaagagttaaaatgatctgataattttgtttagaaatgcactggacgtatctgaaagaatatataagaaatatataagaaaatcactaagctctgatgcctctgaggaatagccctgaagaaactggaggacgaaggtgccatttacctttcaggactttttaattacttgaattatttttacctttggcatgtattacttttgtaattttaaaggagaaaattgatttactatttcaaaaataacaaagataccacccatattctctcaagctgcgtagaactcattgttcttgccttccagagcaaggactagcatcctatgatacacacataagctaatgtttttctatggattttcctacacagatatccctcaaggtacttccccttcccttatagtttttagaaaagacaattcttcattttttggcagcatggaaataaccatgagtcagagtccatttgaagcatgatgggtggaatgaaaaagtgagaagaggccagggctgtgggcagcagatggccatgaaaagtgatgctgtatcattgcttcactgcttcacacattagagccyacaggtcgttgttgacttgagtgtcttcctgatggtactgcctgagccattctgtgtatcaytcagaacattactctaaggcttgtatatcttgtatgtttttccctctagckggctgtrtaggattctaccttcagtttctcacaagccctttgaatccattgacgaaggccawgtcactcacaactgggatgmagttgatcctgatcctaaccaggtaacctggtcctgtgaattgaagcttatcrtatacccaaagccttgactagaaatacctaaatagaataccatggtcattggaaaaaataratagttttttaaagtattattttaataaatgctaaagtgtgtctgttttctgctcaaacttgggtggtgtattagtccattctcatgctgctatgaaaaaataaccaaractgggtaatttataaaggacatatttttaattgactcacagttctgcatggctgaggaggcctcaagaaacttacaatcatggcggaaagggaagcaaacacatccttcttcatatggcggcaggagagagaagtgttaagygaaagggggaaaatccccttataaaactatcatatcttgtgagaactcactatcatgagggtaaccatccccatgattcaattacctcccaccatgaatgtccctcccacaaacgtgaggattatgggaactataattcaagatgagatttgggtgagrcacagacaaatgatatgaggtgggaattttggaaatgatggattgattatgtatatacatattgttaaaagaaaaacctttgacaaatctaatttaacagagtttaattgggcaaaggacaattcacmaattattctacctgtagccaggataggttctgagagattccagtgcagacactagtagaagacgatttatggacagaaaaaggaaagtgatgtasagaaaacagaaatgaggtacagaaatagccagattggttgcagctcggcatatgacttacttgaacacagttttaatagtgtgtcaccatgattggcacaagagtaggttacacatccaattagsttatggttcactatgtatggagaaacctttaggcagaacttaaaatatgtaaggaggcaactttaggacaaacttgattaacagtctgcgtgtktgtgtgtgtgtgtgtgtgtgtgtgtgtgtgtgtgtgtgcacatgcgcacataagcttgtatttttctagcctaatggcatatagatggacacaggagtagttcggacttactagaactgctcaggtgaattggatgagcggaaattttataggttggtcaaaatattttatattttataggttggtcaaaatatctacatgctcatggttttttttttgtttttaatctaaacttaccacaaaatatagaaaatacattcaatacagacatctttgaagagaggcctttgaaatctggcataggggtgagagtcttgctatctgggctgaattatgcaagtctattgtggtcacagatcactatcacagtctcttcagacctaggacttccattctttttctaggagtttcctccttttggtctagtaatagtgggcgttttctctaattatcgttattacttacgtactctgcttgcagagtatataagataaaatgagacagaaccagtactatagcaatgagatagacccagtgctataaacgactgagctctttttttaaccttctgaraaccccagtgtattgcctttgtccctgartttargtacatgttgctgataataggtatgtagggcaggaagaaaaacagacctgggtttgcatccctgccsatctacttactagctgtgtcttaagctatgatgtttcaattgtaaaatgggatgataacatttgcctcacagtgctattgtgaagattatgagagaataggtgtgaacctgcttcatacaatgcctggcatgtgataggcaaraaccatgattctgatacagctatttatatttacctgaatttacattattcaggtaactttatttcttcattttatattattttttactctgaaggcttcttctgccctctttccctccctcctactctctctctcctycctctctccccaccccgccactttccacaacccaaggaaatctcctgcttcccctttgtttaccatgacattttgtctatacctgcmaatctccctcccctaagtgcttagactttttataagacaaaagtcaaaataatttatagacacctttggtttcctgcccagttctctctcttgtcttaattatggaaatctcagcgaaataagcatctgcttgaatgttaccacccctctctaccagggacaggaagggagggaggcatttagggtggaaaaatgtgaattggtatttaaaatactatctacctcatagccactttgaaactaagatattttgtytaaataattgacccttaaactygtatgaagtttaatgcataaagcagacatcctccctggtccccagctggcctatatattgcctttaagcacattgcaaaatgcagcccctattytaacccccaaccccttagactcagtcccccacacaaagggacacagacgaggcattcmgctcctccctttccccttcagtgggacaaggcccttgcacagggcacagcttgcacaaccaacctggggaccctgacttcacctcattcctgagtytcatgtggattcaagtaatatgggtatagtaattatgtatatgaagttaactaaatgagggattataagaaaagtccatgggcagatttggataatttaaattattgtttatttataatgaaaaataattatttattattattttgcttcaagatagcaatcaaatcagtagtggttaacagggtaggctggggagttccagggctcctgcctgctcatgtcgatcacaacaattttctaagcctctcaaccttaataaatcttcatagatctgtttatagttgtgtggacaacagtggagccatacttcttttacatagttttattcggggtgggaggttaggttttaaacctaacctttaaagaaaatatgtgatgtgrctctactttgagtgtgatgtgtaatatgctcagtaatatacctttattatatattattatttccttgactatcattgctacattttatttaacatgaatacaccctttcataggaactattttggagttcgtgtgacatatccatggaagacaatcttgttctaatagaatttttctagctttgtcttttttttttttttttttttttttgagacaagagtctcaccctgttgctcaggcgggagtacagtggtgtgatcacagctcactgcagccttgacttcccaggctcagatgatcctcctacctcagtcccctgagtagctgggaatacaggtgtgcaccacaatggccagctaattttttgtatttttggtagagaaagggttttaccatattgctcaggctggtctcgaactcctgggctcaagcaatstgcctgcctgagcctcccaaagtgctggaattacaggcatgcaccactgcacccagcttagcttkgtctgattgtatgagtaaaatatacttataaaaacccaaaagtattgtagaaattaataaaatattactggacgtctcccatcattaagtgagagtcaagtatataagttgtacatgttaattcattatttcataaatagttgacatacattttgaccaggaagtttgaagcaactggattaaaaagcttgagttaatacagaggcatcaaaatagctgtatcagggtgggcatggtggctcatgcctgtaatcccagcactttgggaggccaaggcaggcagatgacctgagactgggagtttgagaccagcctwacctgaggtcaggagatcgagaacagcttgaccaacatggagaaacaccatctctactaaaaatacaaaattagccaggtgtggtggtgcatgcytgaattcccaactactcgggaggctgaggcaggaaaattgcttgaacccaggaggcggaggttgtggtgagccaagattgcaccattggactacagcctgggcaacaagagcaaaactccatytcaaaataataatgacaataataataatagctgcattggaagtttytgcttgttttytagcagaccctcagcccatatttgttccccttctcyccgcttcccatgtctcccattctaacctatggttagaatggctttgcttttgtccttgaacttgttgcctttyttctgttttgaattccctgaacactttctatatggtagccaccaaatgaatttcttctccaatatcttccctgctcctttgagaccttgtcttcacacacactgggagagatgtgcctcagaattcaatagcgtctcagtgtctctgtgaacaccggctccaaccaggtagcagtttattatctttctgacttgtgacctctgtcacctgccaactacttctctctccatgataaaccctggctgatcttgcaaaatctacccttttgtcttttcttttacaccttctttacaagttaatatctctttccaattttatacttcattatttaaccacagcattttgcattcatcactttctccctcataacctcctccaaatatgtactccagactctcagcaagaaaggctgagaaaattatatttaggcaccctctgacagtccttcccagctgaagcctgtgtgataggtatgtcttcacctgtcatagaccaaatccaatacttcatcagcttcaccaactatccacattagtcatctctgggaatttgaagacctgaggaytgcctgatgattcctccagtgtaacatttartcccaaaggcagcatcttgcaatatgtgatcatcactgtcatccttgataccctctcaggaagactgggggctgctccccctaaagccttcattttctttagtgtatatttaatcagttatccaagaattaatgcaacctctttttgagtgtatttaaattcagcctgaggacataaattcaattaattaatacctcacataagaagtatacctaattttatgtgtctgcctctaatttctgaartctcagaatttaatgaactaatctacatccartttaaccatgattttacagatttcagctagaattcctgaattagcacttctctttaagagtcctttaaaatttatttttcttattatttcattctaacctcttgattgttgaaaaatcagattcttgactcagttaagactcagctgagaaaattacctcttggttcttaaccagtataatttggatcaagtgagaaatacctcaaagctaattaaagaacatatcataaaatgccttctgtctctagtacatgcaaattataaaaaaaagtttcaaaacaatatacccttacagggtatttgctgtctaatttgtcaractttccaggttttgccatcctgaaatccccttccctccacaaatgtcttggattttyctgcctctcttgcccaagtctgtcctagtcacagccagactccttgagaaataatctaaacccactttatcaccctcattcactctttaaccctatgcaattcagcctgcccagatgactctattgaaaatatttataccctctttacacaatagtgcatcactctctaattaatacatatttttatttaaaacttacattaaagtgtcaatgcccagtaattccactaacacagagttaacaacttctaatgttttgggttctttccagtcctttctttttgwacatatatgtaaataaataattcctagggtcccatgtagccagtaaccaagagtaatttaaaataatatctggccaggcacagtggctcatgcctgtaatcccagcactttgggaggccaagatgagaggttcacttgagtccaggagtttgagaccagccctggcaacatagcaagaccctggctctacacaaatgtgaaaaaaaattagctgagcatggtggcaagcaccggtagtcccaggcactcaggaggctgaggtgggaagactgctcgagcctgggaggtcagggctgtggtgagccctgttcatgccactgcactccagcctgggcaacagtgtgaaaccctatctcagaaaaaaaaaaaaaaaaaaaggaagaaaaaagaaagaaggaaagaaagaaagaaaagaaagagaaaagaaaagttaatctttacttgtttttcctgaagacattaaacagtatccaatatatgacccacagcaacactttttaaaatcccctttttccagtttttcccagactccaaccctctcacatctgtcttctctcacctcacctctcaccttccccaagctcttcatgccttgtcaccattgattgttggcttctctcttcctccctgtacattctgcctctagaaaatgatacctgcactgtagatcccctaccccatttggctgggatcacacatggtgttatgtgggataacacacacataacagtgacctccatggcaatactggagttcaaaggactccagtgagaataggcaaatctgaattttccgcagagatcagggaagggaagaggaagaggctatgaatacacttataatagtgcttttaaaaaaaaatcagttacatatatatttactataattaagctgatggtgtaatgcagtcttagattatttttatttaaatatcatattttgcgcctttttccatgtctttttaaacttcttgagtgtagatatttttgatattatattataatccaataaatgtttataaaacaattcctaatattgtgagatatttgaattttttccatttttgctattatgtagtaaatccacgctaaatataatccttttctcctctacatcccagcctggaacaacagacctccttcttttcttcctgaatccccttttttccctgggttccatgacattgcatgattcccaaacctgcaaaataagtattcttcaaggtcctgaactaraatcttgatatagtttgactgtgtccccacccaaatctcatcttgaattcccacgtgttacgggagggacctggtrggaggtagtctatctgcacaagctctttctttgcctgctgccacccaaatgagatgtgactttctcctccttgccttctgctatcattgtgaggctttcctagccacgtggaactgtaagtccaattaaacctttttcctttataaattactccttctcgggaatgtctttatcagcagcataaaaatggactaacacaactctcacctcccccttgtcatcatctcccctctgagagaaggggaagtacttactctctctcttcccctcctcttccttactgtctttcttatcctcctcttttcttctccttctcttcaccccaaccttccccttcccctctgtattgttctgctaragctatcataacaaaaaratactgggtggcttaagcaaaararatttactttctaacagttctggattccaarattgaggtatcggcagggttgctttcttctgaggcctctctcattgacttgtatcttctccttggctcctcacatcatcttccctctgtgtctatagccaaatttcctcttcttataaggacaacaatcatatcagattagggtccactctagtaacctcatttaagtttaattattcctgtaaagactccatctccaaatatagtcacattctgaaatacagggggttaggagttcaacatatgaatttggaggaggaacacaatctagcccataattctctccttctgcttstttttccctctaaatatctactaaggattcccamtcttttggattctctttgccttagagatgaagggatagttgttgataagaaataatcaagtgggacaaactaacaggaggaactccttgagcaatagaggattttcctagctcactacactgaatcaggtgccaagtccatagaatggtgatgcctgagtatacataagagttaccaggggacttgttgaaaatgtarattcctcagtcttgctccccaragatcccagttcagtaggtctgaggtggtactcaggagtctccccagatgactcccatgcaggttggtgctggactgcactttatgaaattctgctgtaragtgtgctttcaggatctctctggttccttttttccttttcctacctccacctggttcagacctcatttcttcttacctagactatkttaatgaccttctacctgattcctatgtcttcccctccctatcccacaccgtgctgccagaatcagcgtgctaaattatyatctcaaaaatctttaaatytaaccatcacccgccccctccactgcccagccaatccagtgcaggcttccagataagagatcaagagctytgattcactatcacagcctttcagactctccactcacttccatgtcccctacctatcagtcacactagaaccatcgtcattttatctacctgggatttcctgttcttccatcacaaatactcacccatctaaatctcactcaygatttatgattcattttaaataatactttyttcattatgccctttcaatatttctcagagtatttaaggttctatgtctctatcatcttcatctgatctgcagtatccagtacatgccttcttccaaatagaatcgcaagtatttgttgaatttactccctgatagttcagatcctatcattctataaataaattagattgcatttctctaaatgcattcagtggtgtgtgccaacattacagtgcacattcccctgctcagcccttttggacagcttgctagctctttttacatttcatctccatcaacttacatttcacttcttgcaaagatattggmgctgtctrcaaaccagatgatttcattgcttatatctcttattttccatatataagaatgttaaataggccctgtgccaggacttattcctgagagaacatttctatttacatttctcttccaaagttatttgcactgatccacttccttgtttttctatcatgaggttttcacatttccaggatcttctgtaatggattacctgagggaararacaatgtcatgttcacctccagcatctagcataaaatctggcacacagagaggttcaataaatactgtttgaaataattaatataaggggattagacaagaaacattaaccctgaaggacctaagcagggttagtgtcccaggaatcagactggccagggtgattcagcactggaggaacagtaaacaaaggtcaatttggaaraccaggtwcaagaccattaaaaggagggaaagcttgggtttaggagccaaggagatcaggaataatttgggaaacaggtcaagacaggctaagatcaaagggctcagggtgtaggttagtaagagggtctgaraaagtgttggcatcagttcttagtararaaaatttaactgttctaaaccatcagttttttcacttctaaaatagagatgataataataatcatagggagcctcagagagttgttgtgagaattaaatgtcatccaacaaatatttattgagtgactattatgttctatacttcgtgctaggtgctaggtaatggatttaaagctcttagctttacattcaaggacaaggtcaaatgagaatccaagttttcatccttgatggctcatcttcatttgtagcctcatgaaagacttttgttatgttttgttttgttttttgagtacaggctggagtacagtgttgtgatatcagctcactgcaatctcctcctcttgggttcaagcgattctcctgcctcagcctcccaagtagctgggattacaggtgcccaccaccatgcccggctaatttttgtatttttagtagagacatggtttcaccatgttggccaggctggtctcgaactcctcatctcaggtgatctggccgcctcggsctcccaaagtgctgggattacaggcgtgaaccacctcgcttggcctgaaagacttttagaaatctaaattacagtgacttggatcctcattatctatattcttgcctatcacctcaaagaactccaacggatcaaccaaagcctgatttctctccacataattcatgctacctttttttcctcaaacttccaaagtttctgaagaattcaagtgagccactgttttattttaatccttcctatctttcttagtctggactgaaactcaccaccacaaattaccctggatctctctgctaacaactatttatacattgtattagtccattcttgcactgctataaagaaattcctgagactgggtaacttacaaagaaaggaggctcatagttccacagggtgtacaggaagcatagtggcttctgcttctgggaggggcctcaggatgcttccaatcatggtggaaggcaaagggggagcaaggtatctcagatggcaggagcagagcaagagagagaggaaggaagtgctacacgcttttaaagaccagatctcatgagaactcactgtcatgagaacagcaccaagagggtaatgctaagccattcgtgagaaatccacccccattatgcaaccaccccccmyctcttgctcctgctcccatcatatgaratgctcccatcatatctttgccttctgccatgattgaaaactttctgarcctctccagaagcagaagctgctatgtttcctgtgcagcctgcagaactgtgagccaatcaaacctcttttctttataaattactcaatcttaggtctttgtttatagcagtgcaagaacgaactaacaaagaaaattggtaccaaggagtgggacattgctataaagataacctgaaaatgtggaagtgactttggaactggataactggcagaggttggaagagtgtggagggctcagaagacaggaagatgagggwtagtttcaaacttcctagagacttgttaaattgttgtgacaaaaatgccaatagtgacatgaacaataaagtccaggctgaggagatctcaaatgaaaatgaggaacttactgggaactagatcaaaggtcaaacttgttatgccttagcaaagaacttgactgcattgtgytcctgccctagggatctgtggaaytctgaacttgagaatgatgatttaaggtgtctggtacaagaaatttytaagcagcaaagcattcaacatgtgaccaggctgcttctaaccgcytatgcccacatgcatgagcaaataaatgacctgaagttggaacttaaatttaaaaataagtttrgatttaaacctatatttaaattttaacttgtatttaaagggaagtagagtgtaaaagttaggaaattttgcagcctggccatgtggtagaaaagaaaagcccattttcaggagaagaattcaaacwggctgcagaaatttgcataaataaaaaggagccaaatgctgatagccaagacaatgtgggaaaggcctcaaaggcatttcacagrcctttggggcagttcatcccatcacaggcccagaggcctaggagggaagaatgattttgtgggccaggcccagggccttgctaccctgcacagcctcaggacactgttttctgcatcccwgctgctccagctcctcctgtggctcaaagggatccaagcaccgcttcaaagggtgcaagccataagccttggtagcttccatgtggtgttaagactgcaggtgcacaggatacaagagttaaggcctgggagcccccacctagattttagaggatgtatagaaaacttaaatgttcaggcagaagccagctgcaggggcggagtgctcacagagaacctctactagggcagtatggaggggaaatgtggggttggagctcccacacagagtccccgctggggcattgcctagtggagctatgagaagarggctaccrttctctagactccagaaaggtagatccatccacagattgcaccgtgcacctgaaaaagccacaggcactcaatggcagcccatgagagcagccgcaggtgctgaatcctgcaaagccacctgagtggggctgaccaagaccttggtagcccacccctcacaccagtgtaccctggatgtgggacattaggtcaaaggagatttttttggagctttaaaatttaatgacttccctgctgtgtttcagacatgcayggggcctatagaccctttgttctggccaatttctcccttttgaaatggaagtatttacctaatgtctataccccyattgtatcttggaagtaactaacttattttatattttacaggctcataggtggaagggacttaacttgtctcagatgagactttggacatttgagttaatactagaatgagttaagacttttgggcactgctgggaaggcatggttatattttgacatgtgagaaggacaggagatttggaaggagccaagggcagaataatatggtttggatctgtgtccctacccaaatttcatatcaaattataatccctaatgttggaggtggggcctggcaggaggtgatwggatctkggggacagtttctcatgaatggtttagcaccatccctgttggtactgtcctcatgatrgtgagtgagttctcatgagatctrgtcattgaaaagtgtgtggcacctcccacctctctctctctctttctttctctctctctttctctctctctctctctcactcctgttcctgcaatgtaagccatgccttctcctgcttcaccttctgtcatgattgtacatttcttgacgcctcctcagaaactgagcagatgccagcatcatgcttcctgtacagtctgaagaactgtgagccagttaaacytcttttctttataaattacccagtatcaggtaattctttatagcaatgtgagaacagactaatatgtacactatgatgactatttcaccgagaaattacttcaaaattcttggataggtggtactsacttctaatgatatgtctgtctatcctcagccagtgttgttgagagtactcaagtcatccaatctagttgagtccatgggaaatttggagggaatctcagtaaattaaagaatttcagttttgaaagggatacttggatcatctagttcaactcccagtattctaactggaaatatttaggccaattatctaatattttcttttcatctctgagcatgaattttgaatcttgataatcaaatgttgataccaattctgtcttcctcctttggtaatcttaagtaatttttaattctaactttggacacccttaaagatgctttcaaattatttttgaccacctcatttctagcaagtaaaagtttatcttccaatagaactcatagaatacagttgtaaaatatgtgaagcaataatacaactaaaaggataaatagacaaatccacaattttagttggagacttcaacacccytctctcaacagttgatagaacaactgaacagaaagtcagaaaagatacagaagtgatctacagaaggagcaggattggaaaaaaagttttttaaaaaagaaaggatatggaagtgacgattttacacgtgtgaagaactgacattttacctttggacttttagaaatatttgattttctagacatcgcctgaatgttattttgacttccaaaagatctcacggtccaggcacagtggctcatgcctgtaatcccagcactttgggagggcgaggcaagtggatcacctgaggtcagaagttcgagaccagcctggccaacatggtgaaacctcatctctactaaaaatacaaaaactacccgggcatgggggcatgcacctgcagtcccagctactcaggaggctgaggcagtagaatcgcttgaacccaggaggtggaggttgcagtgagccaatatcgcgccactgcactccagcctgggtaacagagcgcgactccaaccccccccccaaaaaaaagatctcaaaaatttactttattcttgttcttagcaatgttgttagtgccttagatttattcatctattcagtcattcaacaaatattaatgcctactatagtcaagccattgcattgggcattacaattgattttattatttttgaaatgtttaataagtaaattctatagagaagaagctatttaacaatagcrtatagtataaataaaataaactatttttaaaagttgtaggactatattagtctgatcaagctgccataacaaaataccacagactgggtagtttaaacaacagaaatgtatcttcttacagttctgaaaactgagagtccaagtccgaggtgttagcagggttgatgtcttgtgaggctcctctttggtttaaagacagtccttcttactgtatcctcacatagccyrtcctctgagtgcaagcagagagagagatctcttcttcttataaggccatcaatcctatcagattagggccccacatttatgatctcttttaactttaaaacccatctctaaacatagtcacattgaaggttagggcttcaacacacaaatttggaagaggacacaatttagtgcatatcaaggactaaatcagtcagcaagcatcctttacttctttcagagtttctcctctggagagaattatggaattatagttctcaccagcaccyrttgttatatgtaagaaaaaaacaaaatttgggagagaaaatggctttcctgaagatcacagagwaaacgggaacagagacagtagcaaaaaccaagtcttcrgtgcactctccttttggtctggccttggctcagagagttactgctccacagcatacaataaagctgcagctggctttagtagatgtttgtaccatgcactccatggactcttcctattaatcctctgctcaaatctccctcctcacacttatcaaaatatcacatcagcgctcctgaccaaaatctctgctttctcttgtgagtactgagtttatcagaaccaccttggggattttcttatccttcatgatacaggcccagtatgatctgaatatagaytctgtataatcttctgccatcagggccaacagataaatgactcctctccctatactatctctgtcatttggtggggatcattttttgcattagagaaggttcgtcaaggtcgttgcttcttccrgattgtgggccctattgaaggtatgttctcttcactatgaaatgtagttgcattttcttccaccacctcaggctctctgttctcatgacttgagggctaatgtgctacagaagaccttgaaaaatgaccagctgacctggtcaacccatcagtctctctggctcaaccttttccactcaaagaagacaaaccccttctctgagggccaggactttattaccactcacagcaaggtttttgtttgtttgtttgttttgttgttgttgtttttgttgttttttgttttttagacagagtctcactctgtcrcccaagctggagtgcaatggtgaggtcttggctcactgcaacctccacctcccaggttcagaagattcttctgcctcagcttcctgagtagctgggactacaggtgcatgccaccacacccagctaatttttgtatttttagtagagatggggtttcactatgttggccaggcttgtctcgaactcctgacctcatgatccacccaccttggcctccaaaggtgctggaattacaggcgtgagccaccgcccctggccttaccacaggtattttaacatcaggcagatgtacaaagatattgtcccagtacaacaaaccaggcagaaaatcccctgctactgggatttctccctctctctcttctttctttccccttgctctttcttcttttttcttgatcacttttttccttagatttgtaaatccttagacttgtactaattaatcactcctgctatttagtaactggcattgtcactgccacgtatggcccaagatgccagaatttagttgattgatcagttggtgggttggttggtttgttgactggatggacttttctgagtatgatgcttggttcatcaatacaagaatcacagaacctctggattgggttcttaaaccctagctgcacattagaagaacttttataaaataccgatgtctgggccctaccttcacagattctgatttaatttggtcttggtctcaaaggctctccatgtgattctcatgagtggccaggattgagaatctctggatagagctaaaagattacgcaggcaaccattgatctgatacttaaatcccttctactgggaaatccagaaagatgactctttctggattttctttcygaaactaagattctaggtagtattgtcttcctaacaatcttcctgggtataaatactctgctctgttactatagaaggaagcagcaggtaatgtttagtggtagaccagaacttcccctaaaaaatccagcagtgcttagctgtggcacttcctgatgttagggaaatatcctcccaggtcagtggttctcaactgggagaaaatttcccccaagtgatgtttggcaatttctggagacatttttggttgttacagcttggtggaatgtcactggaacctggtggaggcaggccatggatgatgctaagcatcccacaatgcacagaacacctccccacaacaaagaattatttcgtgtaaactgtcaatagtgccaagattgagaaaccatttcctagatccttgccctcaggtccccctattatacccctaagagataccatccttaatgaaattagtcctaaagcatttccttctttctgaagcatgatttcagcactgtttcccaaatcaacattttacatcctttttaagtatcttttaatgtgaccatcctgctttgcttttaagaaatgaaggctgctgcctgactgtgtgtgtcagagaggcagaataatcccaaggctgccttttccacttgctgcttcctttcccatctggctgcctccctgaaatacagaatgagctgagccctatgacctgatggaggccctgccaagcccaccttgaccaggtgctgcagccagtggagctagtcttcagggtgcgggtcgctccatgaaacgtggcagctgggcttatcagctgccagcctggataagtcaggcctgctgccaagttgattaataagcgctgggctgacacttcaagaagggcctaaacctgctgattttcctcccctcttccttagatcatttcattattaaattaaagattgttgtgatttaaactgaactgtcaggcagcctagggacaaacgtggggtttggtgaagcagctgaacctggtactgcatttaccaaatcagatytcagctgggtgctctttctttctcttaaaaaaacaatttagaactytaagggcttgaagtagaagtagaaccttcccctgcagtgtcaggagcccacacagggaggctggcatgccaggaaagggacctgattataaatagcatgaaaagcagcatcagtcaaaactcactgatgtgcctgggcaaaatgttaaaagaaacaaatagcttytaaaaawggaagcaatggttttatttttataatytaaagtgctaaggaacaaaagcagtttatattcacatagttttaaacacacaaacatgtgtgtgcacgtgcacaaataacacacactaacagagtccctttaaggaaatgatggataaycattttaatataacaaaatcacaagtagagcctcacagagggggtagctgtcctttcttttctatgtaattgatgctatttatttagaaggtctatggtttacccttgtgaagtaatttttctgtatgtgtattttttttccagcttagatggaaaccatttgagattccaaaagcatctcagaagaaagtagactttgtgagtgtaagtcagtcccatccacaccctycctactgctctcctctcttctgtggtgagtgagccaaccatttgyagcctgaatgccaagcaraagcagccctatcaggaggcagcasasacaaaaccacctgcgtatgctttgggggctggcggagggatgtcttacttacagaaaccatatggcccctgacaccagagggtattcatgaactatttatatctcagaaaggccaatgacaattgaacattttcttacttaagttcctttcttttggctagaacgggggcttttaacctttttctcactttgatgtctgatgtctgatgatgtctttgtttataaatatataaaataaattatataaaattacaaagaagctaatgatattgaaatataacgataaaaatactattaaaaacaaatttgatttggtttatagtcattcatgtgctttcttgttaatgtgctaaatcataatatctatggaaaacatctaataattctggtatgagcataaatatactttgaggtatctataacaactataatgtgatatccatgatttttatcattgataaagttacaggcacctctaatactgctgtggttttttgcctacattcatattagttgaaagaaatgataaatttcactcagagattagcaaaagtaaatataaaatatttcccatccaagttcataaatctccctgaagtagatgcttgggctagaatggcgtcaattcaacatggcaactctagttagtacaatgctgattggaagctctgtttgrtagttataggtcccaggagtactggaataactgcacagagcaaggagtatctgggggagaggagaaaggagctctaaggaagtggggctcaaagagaccagtggagggttctgcagaccagcctcagctcatggcttacgtagggacactccaagtgccgagccataggataaattgttggaaacatcttgaagttctcatctttattaagtgctccaaactctttgtagactcacttaaatataccctaaacttrcaaattgagttaaaatacaaaatgatatccccatctcctttcttgtgtgaattgtagatatctggaggcgcagagctctctccttttggctctccatctgcaggtttggggctgagggctattttgagaagacccatgtgttaaggtttcttgcactatggatcatctggtcacacagcagagagaattacagtccatctgaatacagtcctctgccctgttccagagagattaggctgaccctatccataagcagagggctgcccatagtggagtgtacttgagaggcattaactggtccctgatgctgcaaccttcctccccaagcctcctagatgcctgatggtacctccaacagaatctcttcttccagttgatgtcaagcatcaaattgataaaataccaagtaatgaactgatactctgtaagttcttctgatatagccactaagacaacccagatttaggccatggctggagactarggtaaaccacaaactaccaaacatgagtcagtaaattcaggctccttagaggctgcctggattccaaacgtcccaccggtcccaaagggaagaccctagtagaaatgtgcctcatgamcctcagggamcagtggaarggctgcctcttgggcaccgttcacattaacctttccctcttctgtgggtctctcccagggcctgcataccttgtgtggagctggagayataaagtctaacaatgggcttgctatccacattttcctctgcaatacctccatggagaacaggtaagtggctcagttytagggaaggacatgcccatcttctaagggmttttggccagaagtcaaactccaggtttcactcttgtgaagtcacatatgcacatacatagttgtttttgttattggttttctcctcaaggcaatattcatatatatttattgacaatgataatgaatgagacaaaaggcatttatcttgactgaacatcagtgatataaacaagcacatcacataacaatgtaaacagaaaagggaggatggagccctggaatgcaggagtagatcgaaaggcattttgactttaagtctgagtccaaatatgcttttgttgttgtttgatatttcaaggatttttctgagccaaatatgagtgaccaatggcctgcgacacagccatcaggagatcctgagaacatgtgcccaaggtgattgggctacagcttggttttatacattttagggaggcataagacatcagtcaacacatataaggtgtacattagatccaaactgtggtttttatctcagtagaaaagtaacagcagatttaaagcaggcagaaaagaaaacagagaaatagagaacttagaaactctgtagttgcaggttgacctttgggctctgaatgatacaattttcccattggtttaaaatgtgcacaacagactgtaatatgtaaccagctggagtactagaaactctggcatacccttgaacttttccattttacacaaacacttgcaagtagaggcacctttctccttgtctttcctcattcttagattatttgtttcccacgttttttttcttaaaaggaggaactgagctgtgacctaggggttttgtgggtggtggattggtgtactgaatgtaggcaggactccacagtgtttcaccaccgagtcgtttccaccctcttacctgtctcagtttctctctccagagatctagcacctctgagaggcctcaaaatgccaagtgatcagctcttatatgtatttccgggacaaaactatttttgggggggttccctgtagsgccactgcacatcacaggggatgaatccctcagacactgcaactcagcccctagtcacccagggtgcctttcagttgggaagaacaaaatgccctttctcttcagagctgaggagctcagtctctcatttatgcacaaaaatgacagtcacacgaatgcgcagsmaagccaactgagctaaatttggggagraaaaacaatggagtagaccatttagaatacacctccaaactggaaaccaaacagggtacccaaaagggagtcattcttgttgtctttagaaaaagacaacggaggccgggcacagtggatcacgcctgtaatcccagtactttgagaggccgaggtgggcggatcacgaggtcaggagctcgagaccagcctrgccaacatagtgaaaccccatctctactaaaaaatacaaaaaattagccgggcgtggtggtgggcgcctgtaatcccagctactcaggaggctgaaaaaggagaattgcttgaacccgggaggcggaggttgcagtgaaccgagatcatgccattgcactccagcccggacaaccrtgtgagactccatctcaaaaaaaaaaaaaaaaaaagaaaaagaagaaaaagacaatggagaaatcctttagaatggacctgtgaactagaattaggaacctaaacaagagcttcctaggagggaaaaatcaagaactgtcaaccaaacagggctcaggaggacttaacagttccatcagaggagaagcccaaagttgaaggcrctttcaataggtccctgctgataccttagctctgagttcaggcaactccttcagggttctgagtcttctctgaggcccaatgtgtccaggtgccaaattattgttgacaaaaatagtcaaactattaatatgtaaaatatttgaattgatgtattctgagccaaatatgagtgaccagtgacccatgacccagccctcaggagatcctgagaacatgtgcctttgaatatccttaatttctaaggttccccagggctgttcttgagtcccaggtcacagtgtgtgagtttccattaggaccacccattagtagcaggywacccgactttggcttcagctaacagctctgtgtaagcttaaaattyttaagtagaggagcttatatactggctttgcaaaacaaagtatgcaaatggmattcctgccttattatacactacctctggaactggaccatttgtgtccaaagcccaactytacatttcctggctgagcgaccttgtgagccatgaatcagggacaagatcacagccctatgacaaggctctggaggcctctctttgggtcaaatctcatatcaggccacctcccctctctccacttgagccgcattggccttcattcacttctttcaagctgccgcgtgccctccttctaagcacttgcacttgctgttccttctgcctggaacattctttcctttctccaaaccctcacctagataacaccttcagatatcmggtcaaatgtgtcccttctttgaagaascytttgctgattcttcaaactaaccaagtcgctattctttcattccctcaaacttgattttcacagggtcattacagtctgcaaagatattgttctgtaattatttgattgctctctgactccccactagactctaagttccacaagggcagagcctgggtcattttgctccccattttatacccagctctgagcttgctacataggcactaaacaatgatttgtgttatgacgtaatttgtctagacaatgttaaaactgaaaatcacaagaattactstatatgtttcagatgcttttacaattcagatggggacttcttgattggtgagttctgaagacttcagaccccctcactgwtaattgacccctaaccgcaagctgctttctaattttatacacattattttccttcattctycaatctgtcttatttcatttagtgcaatccagagactgaggtctagaggccacaggtggtctggaaaagatttctagtgtacctcaaagcccctactctatttccttgtctctctgtctttgcccatctcttctggacctttctgatgtgggagacctgggcagctgaaaagaaatgaagactaatactaatgggattaacttattacggtaactgtatttgccttgaaactctctcagtaaaagcccatttatcattagtaactgcaatttaaattcaaattttcatgagaccatctaaaatgtaaagtctatcagagattgttctggtctgcctattatacttgatggttttttagtatcaatattttggaatcaacattttcgtgtatatgtcacacaagcaaatgtcagcctttcactggaactatcagaaatgggtgattttccatcctatttctgctacccctttttgaccatgtcacaaaattgtgcatatacaagttccttgcctggtgaccaaaaaagcagagtcattgttttattcacattcttctagataggaaaayagctaatctaagttgtcagaatttatctttttccccaagagactcaataaagctytttgcatttggaatggaaaagcaaatgcagccttaagcctttcctgttcatgaaatggttatcacaccaaaagaattgctcaccactgccctgtctttttttgtcagttcckcagaaarggaaccttctcatttacaccgagtttggcaagatgcttgtacagcccaatgagatctgcktcattcaggttggtgatgtgtccccttctcttccctgcytctcactaatttgggagcagtcagatgtttcagctgctgctatttccaactctaaaattystctgtcatgtctggrcaacgaggagggaatctgagttatgcagaaggttccatgtgctgaagagtaagcaagcttgggtgcctgctttcttttaatrtagcacataattctaaaggaaagaccacttgtcattgcactttcctaaatatttacatatactytggataaggccctgttcccactaatggcagtagaggcagtgaaggtggactttttttttttttagtgtggctaaatcaggcttaccattatctctggacccaatgagagggtagactagaattggcttgggtcacatgtgtgattaggaattcagtttttctttttaaactgaattttaaaaatttctttttaaaaaaattcagtttttcatgtttgctctggtcacctcccaagcagctcaacaaacaagagctttacttttgcatgtgggatgggctatggctctgggcagcttctttataactacagctgtgatttcagagggcacaccagtgtctgctttccattccagagaggaatgcggttcakcatagatgtctttgaggagaccaggggctacatcttggaggtctatggtgtccactttgagttacctgaccttggaccaaytggtaaatcttcattacaagcctctaagcctcgcttgagatgtaggactcagataattgcatgaaagttaaacatccttctcccttcgctgtctcactcaaacttycacttttctctctagacaaattcttctctagaccaagtgtcttcccagaaaatatatgcaaaacagaaagcaacccaaaccaatccattataaatctctctagaatagtatacagacattggagataaagacggcatgtaatagatttctggttgcatagtgtgtacaggaaagaatatagaagtttgggttactgtgggcttgggtcaccagaaacagctccacagaagagatgagaatttgactaattctttatgaaaagttgaggagagtaaagaggaaagggaacagctttgcaaaagcatataagtgagaataagctttgtgattaggaggaagatatttttgttaagtcagtgagatttataatggattggtttggattgctttttgttttgcatattgtataaaatgggaaggccataaaaatgccctgggctgtattcctatggaaaggagggatggactgggtgacacatagtctatgaacctctgtgtacaccccaccaaatccacacacttagcagtcaaaaaaacacatcactcagtgctatgagagatctagaaaccacaccccaggaggcagattaaaacattccaaagtgaaccaaggtctccacagcccccattcttctggcaagctggaggaagtgaaaatgttaggaggggttgttctcaaactgtctcttggattgaaagaaawggctgggaaaattggcccttggtttactctttggtcacatctcccaattcttcccttccttgtcaacagctttttagagcaaacagggacaggccagtgtgtgccttctggtcagctcctctgaggaatccaaatatgcagaggaaggtgggaggcagcaagaggcagctggagccgtggtgggccgtctgtcatcctgttcacctcccactcttcccayyctgctctggcttcctgctgctctatagtcagcatagcctccaggttccgtggaacatgtaccctctggaaaatatctataatttgctaaccagccggggacttatttttttaagtccaggagctggaaatgataaaacactcctcagctcgctcctctcagagttaaactgtttttgcacttaagtttttcatgtttggtcttttgatttatttcctttctctggaggaaacactcactcctaagcaaaggtaagcaggcaggtcctaaatacttcttcctgagtggcagacagggtttttcaggctggagaaccgttttcagactggaatctgagttctgtctagggagcagaggcatgccttaggcaacagcgtgtaaccctttctatctgagatcaaggactgtcaatgacttctagaatattcaagggttccttcaaaagaaaaagttctggagttctatcagatcttcccttttcctcttttcagttctctttctctcttcccttcccctcacctgtagtgataagataatgcatataagattgttttgttaaccatagtcactccacaaccttagaaagtaatgctggtttttgtgaatttttttctgaccagattccttgggtcttcctaaaargtaccagactggaaatgcagtgaatctttgagcaatgaaagcaatttgtggagtagctcttgacatgaargaaagcctttctcttcatgcaaccatgggcatctttcctatgttttggaagtttctaaaagacttttgggttactgttttctaggggccaatggcttggccaatcctcgtgatttcttgatacccattgcctggtatgaggatcgccaagtaccaggtggttacacggtcattaataaataccagggcaagctgtttgctgccaaacaggtaaagtaaaagggttggcaggcaagggaggaaatgaagagtgattgagcacttactgattgccaaggcgagtgttacaaactttacatatatcctttcgttgttatcataccactacggcactacaaataaagcaaatagttctagtagtcaattatactttcatagtcatggaaaaggccagtaatgataaataatttacmaatttcacagtaagtggcagaaccagaatttgaacccatatctgtctgactccaaaggttgtgccctttctactcaccaagcaatgaaaatattagcaatatgtaggtttctataagtggtatggaaaacataatatatgggcagcataatatgttctgaaaagtaaatgagttaacagatcagccaagatttatagtctccaataccaccctatttcaaatacaagcaatyctacaaaacaagtagaattcagttaattagcttggcttggtttgtaccaccaggctggcaattcaggacacaagcaaaggcacagatattaataaataataataacaacaatgtaatatggactctataacataatatattactaaatgtactgaatatatattagaataaaataatcatataataagaagaacccaaagatctcttctgtttagcattatttgtttgcttcattttgtctatttgamttattccttatattttccaaggtatgttattcttcttaggcagcatctagagataatgccaaccagccgaggccaaccagtttggcacttaaaattaacccctgaagcagacatattgttattctcttattctctgggtcaaggtctctcaaaattcgggggstatttgcatcagaaatcctcaaggaggcttgtttaaaattcagatcctaggctgggcatggtggctcatgcctgtaatcccagcagtttgggaggccaaggcaggcggatcacctgaggtcaggaattcaacaccagcctggccaacatggcaaaaccccgtctctacccaaaatacaaaaattagccagatgtggtggtgcacacctgtaatcctagctacttgggaggctgaggcaggagaatcgcttgaacccaggaggtggaggttgcagcgagccaagatcatgccattgcactccagcccgggcgacagagcaagactccctctcaaaaaaaatgcagatccttagatactactctagccttgcaaaaaatgataagctttggagatgggacatggaaacctacattcattttaagcatgttccccagatcattgtttacatacaattgttaaagaaccacaattgtagaagcagccagtagctcctccgaaaggtttgcactttccaagtggaccctgtgctggttattttctgtgtgagtccccactgatccattctccctctttgccatgatctgtgccctggaaggttgactgtatcacccgggctccctagccagctggtttctgttgggttcaacccacaggaaactacaaggcaggaggaaagacaaattgggatatttcttcccctgcttcctcgctgtttargamtgtgtttctgacagtagctgcatcccccatatgacctcagttcctgttgggtarccctagtggtgggctggagctgattcatagtgacttgcaaaagctgatatgcacgcttctgtccaactgtgtatttgttgatgtcatactggtagctaraaaatcatcatggtgagactgtatacaccttagaaatcagtaaacactatatgtcaatgctttatgtatttttttcagagtgctagttgtgaaatatttaccagcacaccactgggtaacacccttctttataattctagctcttgctaaagtcctataacaatatttccctcctcattccacatgcccaggaatagcagtgtcttcccgctattgctaggctcaratacctcaacatttctagtcattccagttaaccctaaccacgcctctatgagtarcgccttcattaaaatctttagcactttcggacccatagatacagaagggaccaccttcctatagcaggacactgatyctcttctaccccaggacaggaccaggaagtattatgttaggattgctctgaaatctcaagtcytkggagttggaacttttagaggccttctyccctctcctggactcaccaacccaggcactgtgtctattgcaagctcctctaggctgaaattacctggagaagcatcacagcaggtactctctgttccaggaaacagaaggtagcccagattgtttgagamctgctgacatccacagatcctcacagttaggttaaaaattgttgaaaaggcactacttggagaatgtgctgtgtttctgctgcatgtgtgatcagaaggcagctgcagcttatgaaccagaaaaatagggttagtggctaagtagagggtgtgtggagcaaccacaaaatgattcagggttatacttctcccaaaggacggtaaaattaaatcgagaacaaaatcaaatcaaaagaagagagaggtatactcagtacatattgtgggatcacagctacaaaagcattagatggtaaaattatcctttcctgctttttgtgtttaggatgtctccccgttcaatgttgtggcctggcacgggaattatacaccctacaagtacaacctgaagaatttcatggttatcaactcagtggcctttgamcrtgcagtaagtctgaaccctgtnggggccttgggatgaggcaacgcttgggtgggaggggtccacagtagacccctgacatttacagatctaacatttccaatgtcaccrttggaagccctaratatagtcatttgtcctttggtgagggagtaaataacacaactagtagggaagcaaagccagatactcaacattcccctgtgaacatagcttcattctctacagagcattggtgatactctgacttgtatttgccaaactaagtggataaacacttagtttctttgtggaaaatttatcccccaaaacaaccaagtgttaatgtcggtggtagaatgaggagaaaggaactttatgaatttggagaagtccctgaccccacaactctcaagagcctcctctatgatctctgacttctcaccccagtrccttcattcctggctgtatttggcagtgacagagtgaacagcccacttctaaagttactcataactttcagtgcttgagtttaaaccaaagaaattctagagcatgaacttggtcatatttttcactcagttcgsaggccacaaatggtctctggtctacagtgcaggctcccaagaccctacattcttaataaagtggtggttctgagaccccggggggaagttcattttgcagctcacttcataagagatgaacctaacccacaagctggaaggataattagagsagaagtcagagactcagaggcaaaaggattattgtgagccagttcagtttatctctggggggacaaacctacctctccaaacagcagcaactcttaataaaagcaaaggggaaaagaaaagtgagacatcagaccccaaacaaacagcacgaaaaaggatcctgagacactgataaagctttatttgtgattcactacctttgctttaatagtttcagatcatgtcccatgacagttgaagaaatgtcaattctcacagcaataagggttgggtttatttttatttgaatttacacagatgcgatcttctctgtattgctgcaatagttatttttccaaaattyagttctgatcatgccaccactgtctycattagaaagcctttgcaggcttcccatggcttaggattaagtctgcactctgaagcatggtgtttgatgctcttcaccatctgtccctggactcattttccagtatcacctcttgcccctytcccttctgtcaawgcaytggggttttagccttctctcctcttaacaaaatytytgtgcactttgatgtgttttcagtgattaaaatgtcatttcccttccttcccacttccttagtcctccctccctccctccctccctttttcccccatccccgccacgtccttcctttctttttttttttttaacttttattttaggttcaagggtacatatgctccttccttccttccttctttccttccttccttcctttctctctctctttttctttctttctgttcattcttgaagacctacctcaaatgtcacctcctctttgaagccttccttgaccctttcaggtagaattagctgcccaacccccaccccacaattaatgctaaagaagcagggaatcgatccccatgatctttgaatctccagactcttacatggcatctgaaagggaacatgattgttgatttcaattaaattgaatctcaaccttctcactaaagaattctgaagagttttaaaaagtataatttcgtccctcaacctatcctatctctacactaccactatgaagactacggatgtaaatgctgtgttttagacctgaaagtcaaacaaaggtaggaaagcaatgaaccacttctcagacttttctgccaatggatacaatctggaatctccgtattctcccaaagaggagcacatctacaccaaaacttggattttgctttatttctatttctactttgctctgagcatcccttctgctgcacatctcagctctagtcaacttgatctgaggttgagaagcaggcaccgttggttctcakacccacggggtaataagttgcatgtaatgtgggctcagcagggtgaaaaagcagttcagaatccttttagctggtgttaattcattttgcctcaagcacagcaagaggaaaaagtcatatgagtgattattgcaccttgatgacaagcccagacttctgttgtttgatcagaaattaggctgtccgtttgcagcaacatggatgcagctggaagccataatcctaagcaaattaatgcaggaatagaaaaccaacttctgcatcttttcacttataagtgggagctaaacattgagcacccatggacataaacatgagaaaaatagacactggagactactagaagggggagggtgaaaaaactacctattggatactatgctcgctacctgggtgatgggatcctgtattagtccattttcatactgctgtgaagaaatacccgagactgggtactttataaagaaaaaggggtttaacatatccacagttccacatggctggggaggcctcacaatcatggtggaaggcgaaggaggagcaaaagcatgtcttacatggaggcaatcaagagagcatgtgttggggaactgccctttataaaaccatcagatcttgtgagacttattcactatcatgagaacagcatgggaaaaacctgcccccatgattcagttacctcccaccgggtccttctcacaacatgtggggattatggaagctacaattcaggatgagatttgggtggggacacaaccaaaccatatcagatccywaccccaaacytcagtatcacacaatatacccatgtaacaaaactgcatatgtatccytctatctaaattaaaagttgaataaaaataaataaaaaaattagaatgtcacttgcaaacaccttcatgtatgcatgaaatgtgtgtcattgtccagtcacttcccttgcatcatgcgttcagtctctccttgtgtgttcacaggacccatccattttcacagkattgactgctaagtctgtccgccctggagtggccattgctgattttgtcatcttcccacctygayggggggttgctgataagaccttcagkcctccttattaccatagtaagtctctcttttaccaagccacatttgcaagccaaagagacaacaaagcagtgagcgctacacaktgggaataatgcctgggttatttctggacacccaccatggcatgaattcaggatcctgctgcacaaggcctagtgctgatccccaagctttaatctctttaagggatggtagttgtgttagtccattcttcgttgctataaaggaatacctgaggctacttaatttataatgaaaagaggttcatttggctcgtggttatgcaggctgtacaagcagcatggtgctggcatctgtttctaatgargcctcaggaaatacaatcatggtggcaggcaagagggaagctggcatatcacatgatgagagcaagcaagagaaaggargaagtcccagcttcttttgaacagccaaaccccatgtgaactcatagagtgagaactcactcataaccgtcatgatggcaccaagccatttatgagggatctgcctccattacccaaacacctcaaaccaggccccacctccaacactggggatcacatttcaacatgagagttggagggaacatacatccaaactacatcaacagtgatgcattgattctgagcctagttcccagtttctctgtccctgtaagaggcagaaaggctggtaaagtttagaagccttgttagaaagkcttctaaacaagtttcctcacattttagatgtttccttttggggaatactggggaggttgttagttagtctgttgttttgggaaagttcatcacctaagtctggttcagagaaccagagaaataagaagagagagacagagagagacagagagagagacagagagacagaaatgtgccttctccaattattttggcagggcaaagcagactgcagcctgcattaaggaatgaactctattctggaaagagtttctgcagaacatttgttgcctagtacaagacctaacaaatctactatttttattttattaatattattattcttagcacctaataattattgkccaatttctatggctctgttacaagttttttaaaaaactaactcatgaagtgtttataatacttgtaagagacaggtagtattattgtcccccccgctttttttttttttttttcagaaaattaaactgacacaagagggattaagtaactctctcaaggactcacagcaagttaagtgtagagtcaggatttaattgcaggctgtctgataccagagcaaacactcatgaccactaactggtatggctagcatagtgcctgatatatagcatgcttttaataaatatttatttaataagtgaatgcatcaacaagaataaataaagtacttcacggctgtacttaatgaggttgacatttttaattgtgcaatagctagctgaaaatccaatcaaaggtcaatgtgcaattctacttcctggagtgtgcatttttttgtgcatagagttctggaaagactctaagaggcattccacctggaacattctagaaaacaaattcctttctttagtaaactccagggccttctgtttataataggtccctctytatatataccagttcccaggtgtcagggctcaacagaacacaacagtgcactgaatggccaatttagctattttatagcatcaggaatgaaggcccttaggatggacgtaggccactccatggtcaaatgccagcatcccccttttcagatggcaccatcatggtagagaaaagaaaacaatcagttaccatggcaaagacrgcagctattttgtgaatagcatcataagtcgtttctaaaaactgtgaagcctactaaagactctaacttttctcctcctggaagttagtgacctagaggacctgttgtcaaggagagaaaattgccctggcttatagtcygtacttcgcatgttactccttaataattcaccatttcactcttgttcttgtattgaggttactctgtgtgcctgtagtggttcttacattttaccatgtgtcacagtcagctggaaggtttattaaaacacagattactgggctccatcctcagaatttctgcttcagtaggtctgggataggacctaagaatttgcatttttaacaagttcccacaagtgatgctgaatctgccttttttttttttttgagacagggtctcactctgtcacccaggctggagtgcaggtggcacaatctcagctcactgcaacctccaccccccaggctcaagtgatcctccccgctcagtctcctgagtagcttggaccacaggtgtgcaccaccacacctggctttttttttttttttttgtattgttagtacagacggggtcttgccatgttgcccaggctggtcttgaactcctaaactcaagcaatccacctgccttgacttcccaaagtgctgggattacaggcatgagccaccatggctggccagaatctacatttttcactggcaagtcaggggattctgatgaaggargtttacagactgcttgttgagaaatactggcctagggtgtgtccccatccctaggtggargaataatagagtcatctgatttagacaagtttgctactgtgctatagggtctcaacccattccttaatttttatttgtagttcagactygctgacacaaataatcttgagagatgcctcctatagttttttaatgactctcaaagtaaatttggccccagggtagatcttataaaggtatgggtaccctgagttcgttgggaaaaaaccacagaaccccaggttagaaatgagttttccagagatattaaaaatattgccttggcaatactcaaaatctttgctgctttgatgtgactttattataagagaaaatggagaattatttctatagaaatattgcctccagtcatcttaatgtgccttagtcaactagattcagctttttttttttttttttttttttgagacggaatctcactctgtctcccaggctggagtgcagtggcgccatcttggctcactgcaagctctgcctcccgggttcatgctgttctcctgcctcagcctcctgagtagctgggactacaggcgcccgctaccacgcccggctaattttttgtatttttagtagagacgaggtttcaccatgttggccaggatggtctcgatctcttgacctcgtgatccacccgcctcggcctcccaaagtgctgggattacaggcgtgagccactgagcccggcctagattcagctttaatcagaaaggcaaggtctatcctcccactgtcctttgaaatatagaaaatgatatagaaatgtcatcaccaagctcactgctatctaaattcatattcagatcaaagctgaattctgttttgctctcttcttaaaattaagccatgaaggtgaccctgaggacacatactagagcaaggagcttgacaccaaatttaagtcatgagctgaactgtttttaaaacatagacaatttatgcttacatttgcttctttttctgtatttccacttcatagagaaacaagtagaactatgatctgggtctcacctcttcagcaggagctcacacactctcactcactttgtaggggcctgcagtagctttctgtttctgagcagggtgggtgtggctgcttagtcaattataaaagcatttggcacttggttatacttcacatgtaagcaagaagggcaggcatgtatcatgtccagtgtttgattttgtaasggttgccactgccacatctctctattctgtccttggtttgccctctcagtactctcacaggacagactatgagtagctttaaaggctatgttgttgttgttgttgttaattatttcttttttaagtagctttaaaagctatttcttattcatctctgtctcatgttagccagcacatatctaattatatgtgctggctaactggatgggcagatgggtgaagtgggaaaaagacagatgaatgaatgggtaagtagatgtgtggtttgagatgcaaaggcacttaaatttgcccaggtgttatatttctttaattcctgctctatkgtattgctactctaataaagagctttatttcaatagaagcataagattggaagagtggaagcatggtgatttttgttaaattttgtgtgactctagaaagcacaactaggaccaatgaatttaactcatataaaagcaaatttccatttaatataagaactttcttacacacagagctcttcaataatatgatatgctttgtagagtggagagcttccattcacatccaggcagagcccgggaggtaatcagtcaggaaagatatagaaatttcttctacattgagtagaagtaaggataccttccaatttcaasatttaggactctatgaatagggtatcaatggaactagaaaaaataaaaacaaatccaaaagacattctgaagaacagaaaaacaagaggataacagattcatctatagaagataatatttgttataataaatagcatttatggtctgttttatacacataccaagattctttcacacagattatcatttgataatggactttaagtctggggttcttttcattacattatcatctatcatccatcaaaaccacacaccctcaatctaagccttctagattgggaattagaaatatgctgttgctgtgtcctacagtggagctacttgggaaagggttatgatytgggagataagataactttgatacagggctcgtaagcttagatgatagagwacattcgctctctattatgactagcattttaattattattatcttctctggsccctgattttytttagatytagcctgattcctgtcagagagtggaactcgagacctctgataatccacatggccatggagtagagctgtgcctgccaagaatgccaatatgaatgttttatgattgttcttctgtcaatccatattctttattaatcctatacaatttactagtttctcctgtgttcttggaattctgcagaaataatgtttaaggggctttgtgttttactggtcttgccttggataataaaaataatactgcttcaaccttcccagggaactgcatgagtgagttcatgggactcatccgaggtcactatgaggcaaagcaaggtgggttcctgccasggggagggagtctacacagcacartgaccccccrtggacctgatgctgactgctttgagaaggccagcaaggtcaagctggcacctgagaggattgccgatggcaccatggtaagtatgttaactgccacattccagcggcctctgaactccccacccttrctgagargggtkgccgtttttcatttctccaaagtcacagaggaagartcaaaagarggaragttaatgactgcataagtatgtttacatgtatatatactcacatccttgtgtatatactagacttctgttgtggtggtgtagaaagatcrttggacttggagtcagacctgggttctgagtttaagtcccatctcttagttcctacaggatcttgaacaactcacttagcttctctgtgcttcattttccccatctataaaatgggtatagtatccaacccagcagatgrctatgagttaacctaacagactgtccaacactattcaaatgtaagggaacattattaatactatgtgaagcctcttcctgtatccttatgcagccctgggcatatgctatgtctcagagtcttctgcgttttgaagtaatcctccagggccacagtagtagcggaggcaggatctcaccttcagcacgtgtttcaagccaaggagggtcaaaaagcccttgcctcactatagtcagggcttgtgagaagcaattctcagctgttttttgcattttcctttgctctgctttggcatggatgcaactgatgggatttaaaacctgttttgtattcttcctgtgtcaggctgtaaacattgaggctgaacacaattgcagctggctgcggtgcttgattttattttatttttgcattcttcgaggtaragtttatggtccacagggagtaattttatgctaaatcacatgcaaatttgctttacttttgaaaataaatgccttcaatgctacctggtttaaaatctatagcararacctgcctgcttcatgcttgcaaactacctaaacagtgagcattatctgtccgtctgtccactgcagtttgctttcagtcccaaccctggagccagagttggtggagctcctttgcaaaaggagggtgttcagagtcccatttgcttgctttggctctatttcccctttcaagggcctctatggagtttctgtaraacccctacatctcaaagagatgcagtctggcagtctcagttaarctattacctctgaagtctcctggaggtgcagtcctggaggctattctagagttgccactcaataacctttggtcccccaatttggctttgggtagtcaatgttatgagggagctgtgttttacaacagtgaggcgtaggacagggctgtttctatgaggagcaatactttgaattactagtgagaaagagctctcctattaggatgggagaccctgggtatcaaggagccagaatacctgatggcggagggtccaacatcttacctagacctaactttcagtcgtcctcaccatttcccattatataattcagacccaggtctatctacatgccttatccttattcttgtttggagtgattaacttggtacaatagcatcttcaaagtcagctgggatggggcttttgttaatccagccaaatggagaggcttttaagaagcagtcagcaaagagacaatagcaatggccataatgatccttgtatgtgaatagtgctttttaaaaatctttattacttattatttattatttttatggatacataataagtatgtatatttatggggtacatgagatatgatgatacaggcatatgatacgtaataatcacatcaagataaatggggtatccattacctcaagcatttatcctttgtgttacaaacaatccaattatattctttcagttattttaaaatgtgcaattaaatttttattgactatggtcaccctgttatgctatcaaatgctaggtcttattcattttttttcttttatttctttatttatttttaacttttatttgaggttcaggggtacatgtgaagatttgttatataggtaaactgatgtcacaggggtttattgtacagattatttcatcactcgggtactaaacagtacccaatagttattttttctgattctctccctcctcccaccctctattctcaagtaggcatcagtgtctgttgctcccctctttgtgtccacaagttctcatcatttagctcccatttagaagtgagaacatacaatatttggttttctgttcctcttagtttgccaaggataatggcctccagctccgtcgtgttcctgagaaacacatgatcttgttcttttttatggctgcatagtattccattatctgtgtgtgtgtgtgtgtgtgtgtgtgtgtgtgtgtatgtgtgtgtgtatgtgtatatatatatatatatatatatataaagctcttaagtttaattagatccatttgtcaatttttcttttgttgccaattgcttttgatgtttttgtcatgaaatctttgcccatgcygatgtcctgaatggtattgcctaggtcatcttccagagtttttatagttttgggcttaacatttaagtccttaatccatcatgagttggtttttctatatggtgtatggaagcggtccagtttaaatcttctgcttatgactagccagttgtcccagcatgatttattgaatagatagtcctttccccattgcttgtttttgtcagcttcattgaaaatcggatggttataggtgtgcggccttgtttctgggctctctattctgttccattggtctatgtgcctgtttctgtatcattaccacactgttttggttactgtagccttgtagtatactttgaagttgggtagcatgatgcctcctgctttgttctttttgcttaggatagccttgggtatttgggctcttttttggttccatatgaattttaaaatagtctttcctagttctgtgaagaatgtcgttggtattttgatatgaacagcgttgaatctttacattgctttggatagtatcgtcatcttaatgatgttgattcttcctacccatgagcatggaaagtttttccatttgtttgtgtcttctctgatttctttgagcagtgttttgtaattctcattatagagacctttcacctctctggttaggggtattcctaggtattttattctttttgtggcagttgtgaatgggattgcattcctgatttggctttcagcttgactgttgttggtgtataggaatgctagtgatttttgtacattgattttgtatcatgaactttgctgaaagttgtttattggttgaaggagcttttgggctgagactatggtgttttctagatatagaatcaggtcatctgcaaacagggataggttgacttcttctcttctggatgcactttatttctttctattgcctgattactctttgccacgacttctaagactatgttgaataggagtggtgagagagagcatccttgtcttatgctggttttcaaagggaatgcttccagcttttccccattcagtatgatgttggctgtgggtttgtcataggtggctcttattattctgtgatgtgttccttcaatgcctagtttattgagagtttttaacttgaagatatactgaattttattgaaagccttttctgcatcttgaatagcactgtataacttgcatagcacttccatatgatctcatccagtcttcccatcaagcctgtcacaggaaatcaggcagcgatactcatatccattgttttagacaaaaataatttaatgtatattagagcccaaacattaatgtgggtgctttgggttgtagcacaagataattctattattttccttttgcctgtctgtattatacaaatttccaaatgtgagcatataagaattgtagggtttggtttttgggttttgttttgtttttaaagccacagtggataagaaaagtcagcaattgatgaagctgtaatgtctaagatgcacagagtatttacatattctttctgttgtggacaaaaacctcctgacagtgcaacatccaccattcagacacttctgagatatgacttttaaaagtgctacagccattcctgcmatttccttcacctccctctcctccccactccctttttcccttttcccagcccatctcttggtcagagtcctgaaaagacaggctcaaatcccagttctgcgatgacttgtcgccttaagcaagtcgtttcccagctctcagccttaattcctcctctgcaaaatgggaagtatgactttcctcacaaggacatagccacagtaagtgaaggccctcagaagatggatattcccaggattctcccatgtctgcccttggatctagcagacttagttccgtaataccatgaagataatttgaagcttaagggctgaattttattttacagaatgaaacttgaggccctgagaagttaagggtcttgtaccaggtctcaccagcttacaaatggtaggaccagagccacaactcagggcttgagcctgctctcctcaccactctagcacacaaatctttgatttgttattggaaratttcacctacccataccttctgttgacatctaatcaaatgtgtttattatctatctcacctcttttttctcatccccatcgtcacttcctccaggcmtttatgtttgaatcatctttaagtctggcrgtcacaaagtggggactcaaggcctccaggtgtttggatgagaactaccacaagtgctgggagccactcaagagccacttcactcccaactccaggaacccagcagaacctaattgagactggaacattgctaccataattaagagtagatttgtgaagatttcttcagaatctcatgctttctggtagtattggaggagggggttggttaaaatgaaaattcacttttcatagtcaagtaactcagaacttttatggaaacgcatttgcaaagttctatggctgtcaccttaattactcaataaacttgctggtgttctgtggacgtagtgattggtcataatcaagtcttgatgagacaaacctggcaggtcaggtcagtcttgctaagattgaaccaaggcccagggccctttgccttgtggttggcctgaatgccttcattctaggagcacaagtccaggcatatactaggtatcacaagaccaggccataaggccaaacgttaagaccatgagctgagactggaggtatggcaaagctcttaggagccaatccagacatggggaaatttaggggatcatgagtgctccaaatatccagctttcaatcgatgaggaaccgggccaataggctgtctaatcttggtagtcacgtagcagccaatatgatgatactggagaagaacaccagccaccaagaagtaagaatcactccttttcttggggtgaccaactgtcccagtttgtgcaggactatatcaattttttcactgaaagacccacatcccaggaaacccctcagtcctggtcaaaccaggacagttagttaccctacccttcactcatttatcaatccattcggtaaccacatgttgagtccttactaccagctacagttgaagatgctgggaatgaagggttgaataaaaagaagcaggctgtccccttaaggagctcacagtctggagagataagggccaaagaaaatcaaggcccgagtataaggccatgataaaaatttccactgtgtgaaaagctgtacctaccagttcccttcctatggtcagcatccctcccagagcgctgggctgcccaagactttagatgtgagttgattagagtctcctggtgtgaaaagacaggcaaatctgaacagaaatatgatggaaaatgatatttttcactacttcagttctgtactttgcacatttccccagctttgttgccatagtagcaattttgatatgctgctaccaaattttcattcagtaagatgtagtgagagtcagctatgtgtcagggcctaaggattaggattgccagataaaatatatgaggcccagttaaatttaaatttcagacaaaccacaaatagtttttagtgtaagtatgtcctatgcaatacttggacattcttatgttaaaaaattattaatcgattacctgaaattctaatttaagtgggcatcctgtatttttatttgctaaatttggcaatcctactaggggtaagtggtcaaggagataggcatggtcctgcccttaccaaggttacattacagagagggagatgacatgacttccccctggagagatagcaaataaaataaataaataaataaataaataaataaataaataaataaatagagggagttcgagtgccgtggctcacacctataatcccagcactttgagaggccaaagcgggcaaactgcctgaggccaagagttcaagaccaacctgcccaacatggcgaaaccccatctctactaaaaacacaaaaattagcctggcatggtggcacatgtctgtaatcccagttacttgggggctgaggtatgagaaatgcttgaaccctggtggcagatgtcgcagtgagccaagattgcaccactgcactccagcctggttgacagagcaagactctgtgtcaaaaaaagataataataaaataaagagagggagacaacaaaataaacaaaaatattacaaactgtggaacgtgctgagaagaaatcaaacggggattgatatggaataacaagtggtatgagctaggagagctctttcttcagaggaaggaaggtcttcagtgaagatgtgactttaaccagacctaaaggataggaaggagcaagtcattggaagagcggggatggggagaggtgggaaggggagaagcattttaagaaaaagcctcatggattcaagtgcctgaaagaggagtgaatgtggggtgcccaagaggaagctattgcgatagtccaagcaaaaataaaccttgtcctgaactaatgaggtagcagcagagacagaagtggataaattccagaatgttttagagtagacctgaaatgacttggtggattggatgtaatgggtgactcaaagaagagttaaggacagggctgggatgactgctaggtttctggcaatggtatttcatggtctcaaaaactaaggtgaagatatctttaaggctgacggaggttgatacatttttttttttttttgaggcagggtctcactctgtcacccaggctggagtgcggtggcacaatcgcagctcactacagcctcaacctcccgggttcaagcgatcctcccaccctcagtactgagtaaccgagactataggctcacaccactacacccagctgattttttatttttttgtagagacgaggtcttgccatgtttccctggctggtcttgaacgcctaggctcaacctgtcctcccaccttggcctcccaaagtgctgggattacaggtgtgagccaacatgcttggccccgatattctttcatataaaaaaagtctattaaaaattaaacattaactaagcaaagaagtcagtactttaaaataagtttaaaaatcgaccactgtagcagaggctgccagtggcttacctacatcccatcagcaatcaccattcagtgccaactggctgctttctattgccagcactggcaactctgcctgaagccaaaaccagaactcagccaaagtgcttaggaatgaatggccttggatgtagccttaaacccatgacaaataggaattagtggattaatacagcagctctgtcacctcatacctctgaggtttgtgttctgccctggctctctgcagctcccagaggaattctgctccaagtgcccacatggcaacttcttgataatgcacccattattcacatccttcccttccctctcacttccccactctcctagggtacttcctggactcttctctcaaccagtaactaagacaaccactgaaatatttcattcacaaaccccaggcttccccttatgagttcattctaacactattcttatacacatatatcaactctcacccatttcagctcactctactctcaatttggtggcaaagccttcctagggctaatgcaacattcctggttgacatccacttagcacccaagcccttttactttgtcaccccactgctggctgcaactccttagttggaggcaagatttcatccaagccagactgttcatactaattataagaagatttcatttccttttgttgtgcctcagatcagctagaaagtttcctgtatcattttcttaattccgttttctaagatgccttcctctaccatgctccccaagaaatatgccatctctttgcttagaaatagaaaaccttaaagaacagaaagcaccctgattaagtttcttccaatgacaggagaattttctgccagatccccttggcatctctctctctctctctctccatatatatatatacacatatatatacacatatatatatatacacatatatatacatatatacatatatatatacatatatatacatatatatacacatgtatatatatatatatattttgttagagagggtgcaataacagccaccttctttctttctttctcagagatgtctttcacagcccagactactagcaatggctcaggactaatggtgctcaacagaagcaattttgtccttcccaccccaagacatctggcaaagtctagagacattttttgttgtcacaactggggagggtgctcctggcatctagtcagtaaagtctagacgttctgataaactttccacaatgcccaagacaatctcccacaacaaagaactacgtagtgctgaatgcccatagcactgaggttcagaaaccctcctctagaaacagtggttctcaagttcatctgtgcattggatcttttgacaactccataactcacagtgcccagagcatgcctcagatcaaccaaatagaaacactagggatgagacccaaatatgataatttttttgaaactcctcaggtgattccagtgcacaggcaaggatgaggaccattgttttaggaatttcaaatcagtatccaaaacaccctctatttccaacctcagatcctggtccaactcagggactggttttgttttatttatttttcagggacaggggtctcactatgttgtccaggctagcctcaaatttctgggctcaaacaatcctcctgcctcagcctcccaagcagctgggactacaggcatgtgccaccaggcccagccatatcagggtttcttaaggtgtacagaaaggaggtgaaaaatccctgaggctcccaacatttgagtaacataatgggatgagctgaggtatagagtgagggattgcccttcagggcagtgttagatatgagttctaaatttcttttcaaagaatcaatatgtcagtatgttcaattctttgccttctacttttaaacttaactttcttgtaaagcaacttttttaattacctgctccaccctgactcatgccgattatctactctgccctgactcattccaattacatgctctgtcataaccatttttcccgacgaaccactcaccccttcagtctgtttagattagccagtcgtaattagtttagcctgtgtgatctaaccctagccaataggggaatgacacagcagcaggggccacatgcgtcagggataagaaccccttcccctcccttgtccaagtgtgtgctcaccattgctccatctgtaagggcgcacccttctatataagtaacttgccttgctgagaattaaaaagaaaatgttatatctgagtgctatttcttttgcagcaccaaaactttatttataacaatttgggggctcatccgggattacattccactctgggggcagtctctggttctctctcatgaggaggcatgccccgcccccttgtggtggcctcaggggtgagaaatcaagactcacccagtgcaaggaataacctgagctctcagcaacatgggaaaaaaaaaaaaactggcccacaacctagcttaaaggatcctcacatactgcgacaatgactctgtgcacagaccaaggaaggagaagccacaggagctggtaaagtatttccttggtggtcgagactaaggaaaaagctgcgaggcggtaaatcattccttggttaggacataccaagtagagagaaactgcaggggcagtaaagcattccttagttaggactagggaaagaaagccacagggggcagtgaagtattccttagttgggaagccttggaggttaaaaagacgtgagaaatccccatgatggggaggttgaacctcaaaaagaggtaagaaatccccatgagggagggttaaacctcaaaaagaggtgagaaatacccatggggggattgaacctcaaaaagaggtgagaaatacccatggggggggttgaacctcaaaaagaggtaagaaatccccatgggggggctgaacctctaaaagaggtgagaaatccccataagtggggggttgaacctcaaaaagaggtgagaaatcccccatggtgggggttgaacctcaaaaagagatgagaaatccccatgggggacgttgaacctcaaaaagaggtgagaaatcctgatggggggaattgaacctcacacaaacctccggtagtaagaaaaatattcagaactcccctttcctttcttcttgggggaagaaagagtagctccactcctgccagtccctcctccaggggaaggggaaggagactggagaacagcagcctaagcagctggcagaggcagggaaagaacagcagagaggaaagagggagagagagaaagtgggggggagagagagagagaaaagagagagagagaaaaaaagagaggggaaagagagacagagaaaggggaaaggggggaagagagaggggaaaggggggaagagagagaggggagagaggggaaaagagagagagaaa

SEQ ID NO: 94987 - DNA, 18182 bp, Homo sapiens
  misc_feature (1)...(18182): n = A,T,C or G
aagatatttgagaaaatataaattatcaaaattaattcaagaagagaaaaactgaacaaaccaacaaccattacagacattaaaataatagccaaaaagctcccctgaaaaaaacatggaaggcccagacagttatacaagttaattcaccaagccttcatcgaatagatagtccctatcttatacaaactgttttggagagttaaaaaaaaaaaagagagaaatctatccaactcatttcatgtaaatatactacccccattaaaaaagaaagaagtatatcccatgtattcatgtaaatataataacaaagctagacaacaaaataagctaaaaagaacatttagagccaattcacctataaacataaatgacaaaattcaaagtaaaatgctaagaaatgtaattcatcagcatattaagaaacatacatcatagccatgacatagggtaaattccagaatgcaaaacaactccacatcagaacaacttaccaaggctatctacctttttaatagactaatagagaaaaaacagataatagatcttaaaaatgttgaaatagcatttgatcaattaaacacccataaatgattaaaaaaaaaaacttttgccaaggaatataagggaattttcttaacccaataaagggtttctgtcaaaacttatagtaagcatcatatatgatggtgaaatatcagattattttctattagagttgggaataagataggagaccccctatttccactattatgcaacattgtactagaggtcctagcgaatgcaataggagagagagagaaaataagtttaagacttggaaaagaaaaggcaagactgctatttgcacgagatatgactgactacatagacgaatcctaaagaatgtaaagaaaagctaatgggactaataaaaattttaacaaggttactgattccaagataagtatataaaaatcaataatattcccatatcccagcaataaccaattggaagatgtaatcggaaaagtaaacaacagcagcaataaaaatctattactgtattagagaggcaagagttctttatggagaaagttacaaaacatgattgaaggacataaaaggagacctgactaatgatcatggatgggaagatacaatatttacaaagatgcctattctccccaagtcaagctataaatttagtgcaattccaataaaaatttcaatggattttttataggacttgataacttaactctaaaattcacctgaaagagaagaggaaaaaacgtagcttagacaattttgaactatgataaaacagagggatttgccccatgaaataacaagatattacaaagccatagtaaaaacacataaaagtaacatatgtttgtcatggacactccttgtattctcaaagtgcctgctggatacattaccacttagaaagaaagtagtcctaggtgggtcttttctaaatatcataaacttctgtgacttaggtgtacctattgggtgaaaacagttgtatgcttattcatgactgatcaggacactgcccaagtcaacagaactacagaggagttggatacaatgaaagccaacctcccatgtggtgctttggggcaatctagattgaagtttcaaatggacccagtatgtcttcttttggaggaagagtaagtgctaggtaaacaaatagaaagtgggttattaagctcaagtaggaccctgaaaaccctaaaatattgttcttattctcccttagggctgctgttcattccaatattgggaggcaaggtcccaggttggctatacaaccaaagagatgactgtccttgctaccccatgttcctggatctccttgccaattaaattaattcacatagtactctctgtctcttccttgcaaccttaataaaactaacaagaagatccaggtttgaggaagatccaggttttggaggagtcttctttaagaaaaattacacaaaactacaaatacaattagatataaatgagaaaaatcacaataaattacaaatttaaaacataaacatcacaaaatgaaatatataaaagaaataataaaatatttgtattaattttctgatatacctctatattttttcctacatattttggctgcatacactttgtttgcctcttcagatggcaagattgttgtaatattgtattctatagaggaaaaagcaagacaatacagtgctttcttgatgcacctttcttacagtttctatatccacctattcatcttctgttccccaaaaccctgccctatccacataacttaaccaccccttcccatttgcattccttcttcacttcaccacatcatcccccttcttccagccaaacacaggtacatatactttgtccttgtaacccatgacctgataaactctgttaggaggtttcttaggaagtaaaagtcttcaaaacaggaaatattcattgatgaaatgacaacttgtgaaattgttccccacttaaattgtccaatcttttaaccttagtgcctatacccacttctatcaaaatccttgtcattcatttggaaatatctagccctcaaatacaactgaaatctattgcaaattaaaagtgcaaatttacaaaagatgtggaatttcatgatcttgaaattgatgttagtaaactgctggatccacatgcaaagtcattaataaaggaggacttcacagagttggaccagataacaaatgaaaaagagaaaaacaatgagaacgatgttgacatcaatacatcaaagagaaataatctgatttcaaaggattaagagaggtctttgggaaaactagataaacgcctccaaaacttttgcaagtaagaccctgcagcaaaaatcaaatgcacagtgaaggataatgagccatataaaaaattatgtccctcctccaaaacaacatttgagttaccagaattagcacatacttgcagttgtaacctaacgtgttaaatataagataaattcatttttataagtttgggttgaatttttttcaatataaagttcaaatcaagtctttttctttcactctttcactatggaatctacatctctatctttaatggattcattctaagagggccttttctggtaccaattatctttggaaaagaaagaccttttgtactcatctctgttttacaagcatgtaatatattttaataccaccactcccccactggaaattgtaaaaaatacagactcttgggttcctctgccataccaattttgaatctccaggtggagaacgggaactaggagttaaaaaaaaattccatattttaatttactaattatttttacttcatttttttttttagaggtgcagtctcactatgttgtctaggctagacttaaactcctgggatcaagggatcttccggcctcagcctctccagtagctgggactacaggtacatgctaccacacctggctaaactccctttttttttaacactcatcataagcaatcctcgtgataatcaggcaagtgtggtaataactactttaactcatccaaagctttctttatagtaaccttaagaaatcttctttaacctagtcagctggtttgaggtaggaggtaggactcggacaccgaaccaaattgagcactagcctaaacaggtcggaggtggaagccgctttccatcagatacacacaccagtgtgtcagttcatcattgccatggcaacacccaggagttaccacccctttccagggcaatgacctgatgacccaaaagttgctaccccttccctagaaatgtctgcataaactgcctctttacttttttgtctgtttgtttgtttgtttgagacggagtctcgctctgtcgcccaggctggagtgcagtggcgcgatctcggttcactgcaagctccgcctccctggttcacaccattctcctgcctcagcctcccgagtagctaggactacaggcgcccgccaccacgcccagctaatttttttttgtatttttagtagcgacggggtttcaccgtgtaagccaggatggtcttgatcgcctgacctcgtgatccgcccgcctcggcctcccaaagtgctgggattacaggcgtgagccaccgcgcccggccaaactgccaaatgtgggtataaatgtgactcaaagctggcctgagctggtgctttctgcctatgaggtggccctgctctacaggagcagtcacggttgtgacaccaccaaagctgtaacactgcctcttcaataaaattgttttcttctacctccgggttgcccttgaattctttcctgggcaaagccaagttccctggttgcctaagccccactttggggctcgcctgccctgcatcagttcgtactcgctggactcattcctttatccttttattctttttacatgctctccttcctagatcagtgtctaatctatacaggttttggaaactttatgtagtctttagaattttataaactgctcttgcttttcatattgtattattttcttagtatttcaaaacacctttgaacaagtcagaatttcctttttttttctcctttaaaatcgagtctgagtaactcgtcttgtgttcattttttctacattctctcagcctgaatcctcatgagtccattttgctctatattcatctggacattagactactttgaaatattaccatttctgcctattctttctgtactgcctgattgtcagctcccgaaaggcaaacaccccatcttccattttgtctggatttcccccactgagcctagaagattgacttaacactgactagtgtgctgtgtgcttcacgcggtgggtgcttaataaatattttaaaacagtattaaaatgttgaataaatttgacagcagtgctgcttctyatcatttcaaatgccaacactttctaggtcccttttctagcaaccatttcccaacatacctacgcgcccccagacgtttcagccaagctggggctctcttttgatccatccttctttgcccgagttatggaaatattgtttacattttttcccctgaggagaaggggaacccaaagaccctgctgtgaaacttgaagttgtttttctccttggtaactggggagaaggaaggacagtagggacagagaaggttttgtttctgattacttcagttttcgccccagatcgtcttttacaataagatacatgcccctatgagtattttcatacctgtaaggatgtttttaattctttgcatctgaagagtgctaaggattttaggcaagaggttttagtattttaactaagatgttttctcatgagctttattcagtatctcattttcttcctgaccttctatagtcagtcaggcaacatttctcttataacatcatttttcctattaatcattatttcgtacctgtgaaaaataagcttacacttaatgttgtatgaatctagcatggtaaagtacagaaaagcttattctcttcttcttgggtagggaattctgttttgcaaagcactttgtgatctatttgttagcttatttaatcctcacaacaactttgctaggtggacaggagtcattatctccaggataaggaaaaggaaactcagagactttaagtgacttatccaaggtgacacagcacggttagacccacaatgaaaacccggacttctgactccacagccagtcccacacagctcaactttacataataagccctggttatgtcagtagagacaaggctgctaggaagaagcagcgcggtgacagatgagtaggtggggagcggcggtggggcagggcgcactgcgagaagagcacttcgcgcatgcgcatatcaccgagcgaacgcgccgtgttcgggaaggtaggagaaagaggcggagctccttgttaacgacatccccaacctctgctaacgcgcaggcgcacttcctgaagctgaaggtcagcatagacaaagggcctcagaatcgcgcaggcgcaattgtgccctggttcgccaagatgtcgttcccaaagtataagccgtcgagcctgcgcactctgcctgagaccctcgacccagccgaatacaacatatctccggaaacccggcgggcgcaagccgagcggttggccataagagcccagctgaaacgagagtacctgcttcagtacaacgatcccaaccgccgagggctcatcgtgagtgtggggcctcccaggcgggaatagggcccgagtcctgggagagaccgagagagaccacgcaaagggtcggccaccgctcccgatcagtatctcagacgcaggtcctcttccaggcctagccaactcactacccttttacctttgccagagcttggccctcgagaggaccggctctggactcagacctggctgggtttgaatcctggcttgatcacttcctgcctgcgtgaccttaagaacgttattcactctgcttatcctcgattttctgtctgcaaaatgggcgtaatatagtgcttactcttttatcaggctgttaggattaaatgagatagagtatgtgactgtcctagcacagtgcctcgttcgtaaggcgtgttcagaaaatgtttctatatatatgcatatatatattatattatatatatattctatatatatgcatatatattatattctmtatatatgcatatatattttatatatatgcatatatattatattctatatatatgcatatatattttatatatatatataattttaaagagctggtgtttacctttcagttcacagctcatagggatactgctctctcctgatgggaatacagtgattccttcaacctgcatcttttaaagaccctgaagcttgctgaagttctaggctttggagtcagaacccaaagcactactcattggctaactctgttaccttgggcaacttcaactcctctgaattatagtttcctggtttcrtatataaatgatgtgcattatgaggttaaataagacagtctgtgtaacattcgcagcacataatatatgcccagtaaactggtaattaacaggtgtgctttcattaggtagttttctatacaggaactaagtaggttaaatatgatgttaacagaacaggactggacttttcccacacgttgcattggtgttttggaatttttggaagttatgaggattgaatgaaagttacaatgtgccaggcactgtgctaaaactctttttgagtactatttacatatcacaactatttggatgattaagctctactactgtccccattttacagatgagaagacaacatgggaaggacaagtaggtcatacagagatacctctttagtaggtgatagagcaaaattctaaccctggtttgtgtaacccacagcatctgcttttaactagttggttatactgtctccagccagaaccttgttaacttgggaagagggtgcagagagacacatttattacaaactcacatgattgggtttgatgtgttagtgtgatgcattaaaaaagaataaggcctcagtcagacctgaaattgaaaccaagatcttctgtcttctagctgtatgcctcagggtagtttcaattttctcatgtgtaaatagaggtaatactaccagtctctttggttctgttgattaaatgagtgtgtgacactatcatttattaatcaatacatgtaaattctcttgcctaatttttttttttttttcccttgagacaggatcttactctgtcacccaggctggagtgcagtggtaygatctcggctcactgcaacctctgcctcccgggctcaagctgtcctcccacctccgccttccaagtagctgggaccacagatgtgcgctaccatgtccggttaagtttttgtattttttatagagatggagtttcatcattttgcccaggctggtcttgaactcctgagctcaagcgatcctcctgtctccgcctctcagagtgctgggattacagacttgagccactgtgcctggccatcttgcctaatctttaagaatgattgattgaatcaataaataattgctcagggtctgttatggccctattttacatgccaagataacaatggagatcaaaacaggcaaaaattcctgtccttgtagaacaaactttctagtaggggagacaagaaacaagttaaaaaattaaaatcatttaacatgttagtggtaagtgatgagaaaaaaaataaagcaggggagatttggagtgtgtgtaagtagtaggggaggtaagcagctacartcttaggcccagggaagccctctgtttgaaggtgacatctgaataaagatctgaaagaagtggggtgagggacctagctctctaggaaggcagcctactcatcagagaacggcaagtgcaagggccattaggcaggagagtgtcaggttaattgaaaaaacactggagagaccattgtgactaaagtggagaaaggtgagggcagagtgggacaagatcacaccaggccttgtaggtaattgtaaggacttttactgaatagagaatttcgtgatctggacttaacaatttctctggctgcttagttgagaattgactatgggggaaaggacaggatcagggagactaggaggcttttgtagtaatccaatctctgttgattaccagggtggtggcagaaggcggtgakaaatggtagattccaggtgtattttaaaagtagagccaaccaggtttgctgatagactagatgtggtgtatgaaagaggagtcaaggatgactccaaggtttttgacctaagtgattttaagaatgaagttgccttttactaagaaacacaggaatgggagaagagaaggtatggaggtggagtagactgttgggaaatcagtttgggatatgtgacgttttagatgcctgttagaccgtatgtcagagttcagcagttggttggatattaagtctggagagttacagggctggaggtaaaattttgggaatcatcagcctttagatagattatttaaagttatctgaccagatgacatcatcaagggagtaaatgtagataggaaagaccagcraggtccaatattaagagattggggagatgaggaggaaaagagcaaagaaatgaagagagaatggccatagagttagcaggaaatccaagcaggtgtgggcctggaagtcaagtgaagacatgattttcaggagttttcaccatgtcagatgctactgagagtgcactggacttttagtgatgtcagaggaggaaaactctcttcatagtgtgtcttttggaacctctcaataacattaccgggcttaatgaactatggtcatggggcaattggtatttttatgaaatgaaatgtctgtttctggaagacagatctggcagatattaaagcacagagaggtgactagcaaattgagaagtctgccatttgatagtcattcagatacatttatagtagaaaggatgtaagaatagatgcattaatcctttcagctattgagctttaacatccccttggacctaatctgtgtctttaccctcttttttcttgttggcagtataggcataataataaacaatgctgcagaacacttgcatgtgctttcattttaatgtggtgtgataatgtcaatagtttctagaacagcagaagatattttgggactttgtatctagtagtgagtgcttacaccgttgaggaatttcagtctgattaaaaggaacggragcatttccatcataaggtttttttttttgtttttttttttttttaaacttctgagctgcagctgattatctcagggtaaattgttgtaatttagtttgaaatatgactgtggaagaccttgtgaaattattttagtcctacaaatcatgacttcttgatgttggttaggaccttgaatattcatgttatatattaaagtcttaaagctgattttatttgcttatttttatctgtcagttaattggagagactaattttgtaaaatcacttgggcatttagctaattaaatttatgtgtttgtgggtagatttgctattcatggatagttattctagtataaatatattaaaatggacaattattttcttaagacagtctgattatttttctttaacaactttgacctttctacaaaacttctaatagtgtgaaatgtctgaattaatgcttttcacactaggtcagcttaaaaaacttacagttcagctagcctaccccctccttcatcttcctacagcttatttgtagcctggaaagactattttggtgatagcattagaaagggtcctggaaacaaaatacaaagcatgatagagcatatgaaatctgtttctcttcattgggaatactgcatggttctgatggtcacacttgacaatgaagctaaaaacagtccagagaagaatagatgaaaatgacaaaggagaaaaagtggcttctctgacagttagattaggttagattagttagattaagattaggattcttaaataaacagaaagctaattagtgatatgagccttctacattctgaaggatttgaacaagatcattagaattcaaaaaacaccagaaatgaaagatctttcctgaagctgtttaggaatattcatgatatacccttaactgttctagagaacaaaatgcgtctgtgctccttcacaaaagtccctatgaatttgtttctcaatgtgatccttcttaagttctataactttttgttttcattaattttaggaaaatcctgccttgcttcgttgggcctatgcaagaacaataaatgtctatcctaatttcagacccactcctaaaaactcactcatgggagctctgtgtggatttgggcccctcatcttcatttattatattatcaaaactgagagggtaagtattcagaccagatgtttagtatttgagtgataggttcactttmtagggaccagctgcagctccttctcttgaagattgccaccagtgcccctcccaccttggggctgtcctctgccttcccttcctctcttcttttatctttattcctttccagcaggagttaaaacagaaagttttcagtcacctttgtctatttttgttagttcatttgttttttaaaaagatgatgtttattgggttwagtattagcagaatacataaatcatttagtacgtttcctgtttgcgtgaattctatttatgttggtcacattttgcaaattaatgttaaaacctattaatactctacggacagagaagcacaagctgcctgtgtggggaatagctgccgtcagcagcctgggtatatgattggagagaaagtcaagctgatctttggcaccaaaccattccacatctggtactaaaccctgagctgcagcccccaggcttgtgttgccactggagcccactcgtctagctttgtctttaactggcccatctgcattcccattagagttcgtgtattttgattatctggtgaatgatctacttaacagaaaggtagtccacattttcccagaaagtgtttgcattttgctttcaatrtatggttttatgggataatatatttctaatgactaaaatgtgagtaagatgtttttgaataggagcattttcttactgtgtctttagttcctcggattactgtttcttcgcacactccctgggctttagacagtgggattgcaattaggtttggagtgtttcattctgtttgtcagttgtanggtgggttgtgccaaaatgcagtttttcttaccttttttatttatttatttttatctaatatagccaactggcagaatatattgtctttaatgtactttttttctgtctttacaggataggaaagaaaaacttatccaggaaggaaaattggatcgaacatttcacctctcatattaagtctggcaatgatgactatatgtattcctgyctaaataaatcatctattaatcattaagtagtagtttctctttcttagtattaccttgattcaatgttaaaaactattaacaccctaacaacacagaagcagacgcagcccgtgttgggaatctgctgtcagagtgacagcaaacatttgctgtacattgaatgaatgaacataaacttyattaaactgtgagctcttagaaagtacagattctacaatcagttgttcaacaagcgagtgttaactacgagccaggcattatgttatgtgcagagaatacaacagtcagtaagacagagcctgttcttaaggagtacgtactctgacagctgtttattgaacaattatttgagtgcttactaccgtctggtactatttaatacctaagcccttgtctggccccagctgcagtggtaaatacagccaaactaacaccaatgtaaaaaatacaatcgagattcaggaaaatgatgtaggcaagctgatgagaagcagttctacctgaggaatttagggaggtggcatttgatctaggctctgaagttcacaaggctgacaggacaaaacaggagcatgaaggggcaaggtgtgttgggtatggctggattgtgggctactgtggggtgaggagatggagcatggaggtcatgctgaggagcagaaatataatggttaggggcgtgacctttggaggtcaaatctgggctagaatcctagctcaagttaaacagttggaatactgggcctccatatgctcatctatagcatggagatagcctactacctcacaaggtcatgaagatgacaatgaaataacagtattatgctttgtagttaagtctggaaacagtagggtgataatttcaccacaaaggcagagtaaagtcaagtgctgtagataaccagcatgctctgtaaggctggtgtagatggtatattggtcttaactttcaaaggatatccacgactactttgatttgaagcttgcataagcatgggttgccccagaaagcagagactgagggaaagtcttctgtgcaggtagtttatattaggaagtgatctgaaggaatagaagtttgggaagagtgaaacatggaaggagggaaagccagcaaacatgtgccatgaacctgttgcctctgagagtaacaggctcccacctgggaccttctgagaagccctgtggaatgtagaatttttcaaccagatgtgggaaaagcaaatgtttgtcttgtctccattggtcawgggttatcccatgcaattctcgtgtacatcagggtatggacatactctggaaaggctgacgatgtttttacaggcattacacatgcgggagaaaggaagcttagggcagaaagcaagtgatgtgcagctgaggtaaagtattgtcaggtcacacttgcaggcagctgacagtggcagcaatagttagagtaaaaaggtggaccaagaggttgtgaggcaggcaaaagagatataggatttcttcctccacttcatgcgctgcttggatctatttggacatacactgagtccagtctataacatgtccttcaaggtgatggctgtatacaatctacagaacactcagtatggacaattagtggaaccagctacagtacatactgttgcaactggcccagagtctgtaactcattcatctcccctcatcgtatttactagatttcccttccttggccatcattttagcaggtctagattgctagccagatgaagtcaccaaagccttcatttctaaggaccagaatcttagttactctatcatcatcagccctttgttgtagcaattgcatgtttacagctgggctggaagtggaagcaccgagatgctccagtgaatcccctggactccagacattaccctttttgccccattgtgtagcagcaaccctagctccgtgggtcacttactgctgccagtatggaaatttctttttcggtctactgtttcccaaatacaagaagtaccagattattttgtttccctggtgaaagtgttcttatgccccagcatgggaatcaggacttcttccagcagaacctaaatttggagggaggggaagtgcacattccaccatgagttactgggatggcaaaaggggccaatcctacttcttggttctcagagtcataaattctagctgctggggcatagcactgtatctatgaccattggttcattgcatataccacatggtcaaccctgagcctcagtcctgctagatgtccttaagctggtactttagctaagcctttagtaggcttagctaaattcatctgtgccctagagctgctgtgtacatccaatcacatgacagtgcttctgactgtccagatcttgataggcagttctggttgaatggtcacctcatctcatactgggtgcccagctgcttttggaatggtgaatttttctttgctgcagaaggcatggccttgctccacaacctaagaagtcagcactgcaactattctgttgccaaggtcttgtaggagactccaagcagcatccttagctacctaccacagacacctagagtattggctttattgtgttatatgacccaagtggctgctgcttacactgcagcctggatctgctgcagagtcctttctgggctccattcaaaactggcagcttatagccaggcatgcctggtatgtgcctaactaattggaaggctgagatgggaggatttcttgagcccaagagttcaaagttgcagggagctatgatcatgccacccactgcactccagcctgggtgacaaactgtgaccctctctctggaaaaacaaaactggcagctttacaaatcactgcataaatgggtcagagtactgttcccaagtagggtatgtgttgtctccagaatccagaggcccacaaagtgctgtgcctttttctttgtagtagagggtgtgaagtggttcaacttgtgctttactttggaggggctatcctggcatgccaaagaccactggatacccacaaacatcactgatatgggaagctcctaaacctttatagagattatctcccactttctggatcttatactagtgcattaaggtaatgaggaatctaatctatgagtaaacagaagctttaaggcagaaatactagaaggtgtgagaaacagcaattcaaaggggccaaggtggtagacacgtgggagtagctgtgtgtaatggtggagtaaagatccatgaattcctgcaaaatggatcttaaaactattttggatctacagctaccatcctgtgcccatgagacttgaccaaatcatatgatttccatgtggttcctgtttgctaatttgcccctgcccatatcattacaataacggtaagaccctgcttcttccacccatcctaatggccattattgttatattgttctccagatcttaaagaattgtattacttgattctcattttgctagagggcaaaaacagaaggaatcctactgtgaccttccgtctttttttctagatgactttagtttaccccgtagtccccacttattcagttatctgaagtcaaccacagttctaaaataggtgagacagtacaataagatgttctgagagagagagaccacattcccataacataacagtgtttactattattattgcagtatataatgatagttctatgttactattagttattgttttattctcttttggaggctgatttctaaattaaattttattatcggtatgtatttataggaaaaaacagtatatatagggtttggtactatctgtatggtttcaggcatccactgggggtcttggaatgtcttttctgttgataaaagggaacacgctattctaataagaatacaagtatacaagtctattataagaaaattacaaatttccaaaaaagaaaattacaaattagttaagtacaagaataagataaaagccactcccaattccatcacacagggatgatattttagtgtacagttgtctttcggtatctgcaagggattggtttgggaccccctgtggttacctaattcctcagatgctaaagtcccttatgtaaaatggcttagtatttgcacgtaacttatgcacatcttccttgaaatcatctctagattacttattatacctaatacaatgtaaatgctatgcaaatagttgttatactgtcatgtttatttctataattttttattgttatattgactttatttatttatttaatttcagtctatggttggttggattcacagatgtggaaccctcggatattaagggccaattgcatatccttctaaaactttttttttctctgtgcttatatatctttttttttcaacaaaatgagatacactttgtataataatttgtaaatttttggctcaatgatttgtcatggacatctttccatgcaatgacttttctgcaacatttcaaataactgctagtattccatgtgtctaccacaatttatttaaccaatctcatagttggacatttcattttccaagtttttcttttttctgagacagaatctcgctctgtcgcccaggctggagtgcagtggtgccatcttggctcactgcaacctctgcctcctgagttcaagtggttctcctgcctcagcctcccgagtagctgggattacaggcaagcaccactacgcccggccaatttttgtatttttagtagagacggggtttcaccatgttggtcaggctggtctcgaattcatggcctcaggtgatctgcccaccttggcctcccaaagtgctgagattaaaggcgtgagccactgtgcccgactcattttccaatttttttgctgttataattaatgtaatgaatgctcttgccatgaatttttgtgtgtgtcttaagttttctcataggataaatttctgggagtgaaatttctgggtcaataagtattcaaatgttttgttttgggtataaatataaaaggttttataattttatattcctgggcaatgaatgcagtgtctgttccctgtaccctgagcacagtcacagaagccaaactctgcccttgtatctttgctctgccacttactggtgaagtgacctggaaagtgtttacattctttgtgcctcagtttccttatctttataatagatgtactaaataacacatagtattgtttaatgatttcttactaataaagtatttaggacagtggtatatagtcttagtgtttactattattatttttaaacctaatggatgaaaactattttaaatttggaatttatttattattgaggttaaaagtttttttcatattatccagttgttttttttacttctttgttcaaaatcactgcttgtttttttgtttttgttttttgttttgttttgttttgttttgttttgaggcagagtctcactttgttgcccagactagaatgtagtggcgcgatcatggctcactgcagccttgacttcctgggctcgagatcctcccaccttagcctcccaagtagctgggactacgggcaagtgctaccatgccctgctggtttttgtattttttttttttgtagagacagggttttgccatgttgcccaggctggtctcaaagtcttgggctcaggtgatccgctcacctcagcctctcaaagtgctgagattacaggcatgagctgctgtgcccggcctgtatttctttctctctctctctctctctctttgttttaaaattgaaaatagagaggaggtcttactatattgcccaagctggtcttgaactcctgagctcaagtgatctgcccaccttggccacccaaagtgctaggattacaggtgtgagccacctgacctggctctgtttttctgataggtcttttttcttaatgattttaaggcataaacaatatatattaaagacattaattcttgatcatactagtcttctttcatcaggaattattttggtacccctcagtaacaggaaaaatatttacagtatattcttggtacccaatgttgaaagaaggcagtacccgaagcaatttttacttagtaggatttttaaaaaacatgttttaatgttaggaattattgagcagtgtgttcttgtggatttaatcagtttcaatagattttttatcagtcaggaacaatgaaatgtctgaaatcacaccggg

SEQ ID NO: 94988 - DNA, 39612 bp, Homo sapiens
  misc_feature (1)...(39612): n = A,T,C or G
gatcacgtttgacaacaaagcacacagtgggcggatccccatcagcctggagacccaggcccacatccaggagtgtaagcaccccagtgtcttccagcacggtgagcccctgagccccagaccagcactgaccaggggccctggcctgtcctgggattccccaagccccagatcagcgctgcctgggggccgtgacctccccaggaatccgctgagcctcagatcagcacagaccagggaccccgtcctgtgctgagatcccccaagccccagaccagcactgaccggggttcttgactcaccccaagcaagccctgagcccactgaccaaccaaaaccagccgtgcagccccctaggtctccagcctggcctggcaccaatgctagcctcccaaggctccatgccatccttggccctacccgctctgccctccccgcaggagacaacagcttccggctcctgtttgacgtggtggtcatcctcacctgctccctgtccttcctcctctgcgcccgctcactccttcgmggcttcctgctgcagaaygtgaggcttctgcgtcatgtgtgctggtgtcctccccgcctggccctggggcgataaaagccagggctttgagggtcctgtgcctggtcaggccctcaccccgcctgccttctgcaggagtttgtggggttcatgtggcggcagcggggacgggtcatcagcctgtgggagcggctggaatttgtcaatggctggtacatcctgctcgtcaccagckatgtgctcaccatctcgggcaccatcatgaagatcggcatcgaggccaaggtgcgtcctgccaacaccctgggccccaggtcccatccctgctgtcagtgcctatccggggccatatcctcccccaggccccccaaaggaagggctgggccagataggttgacgcagctcccacccgcagaacttggcgagctacgacgtctgcagcatcctcctgggcacctcgacgctgctggtgtgggtgggcgtgatccgctacctgaccttcttccacaactacaatgtgagttttgcacatgcagctgggccttccacatggttactccacaccctccaaataaatccctacacacgcagccctcaccagccccggccaatggccccttgcaagcctcctcctcctacctgcccacaccagatatatctgtcactgcacctgcgcggggccccgggagcctgctcctttgtgcccacccagctgagtctagccgtgcgttgccctcggaccccctcagacgtggccacgccccctctaggcacccactggctcccatgaccacaccggctgtgccctcggcaaggccccgcccctcccacccccatctgggtgcccacagctgacctgagttgtggccacaccctcaacgaggctccctctgccccaacccagatcctcatcgccacactgcgggtggccctgcccagcgtcatgcgcttctgctgctgcgtggctgtcatctacctgggctactgcttctgtggctggatcgtgctggggccctatcatgtgaaggtacatctaacccctgatgtccctgacattgaccctgtgaccttgtcattgacactgtgacccccagatgaccccttggtgactgctgggagtctgtccactgtcccctgtggtccttggtgaccctgacactgaccctgtgccattattgttgtcacagttgttgatgaccctatttcgacctgaattactcccctcctgctctatctacccagaccctaggtcggccctgtggccctgtcattgacccgtggtcccggccattcacatgggaccccagcctgggacctggccattcacatagtgaccccagcctgggacccggccattcacgtgggaccccagcctgggtcccggccattcacgtgggaccccagcctgggacccggccattcacaggggccctagcctggaacccgaccattcacatggtgaccgcagcccgggacccggccattcatgtggggccccagccaccagctcctagccatttgcatgggaccccagcctgaccccagcccccggttcctggccatgccttggctccctctgaccccgccrcccctctggcagttccgctcactctccatggtgtctgagtgcctgttstcgctcatcaatggggacgacatgtttgtgacgttcgccgccatgcaggcgcagcagggccgcagcagcctggtgtggctcttctcccagctctacctttactccttcatcagcctcttcatctacatggtgctcagcctcttcatcgcgctcatcaccggcgcctacgacaccatcaaggtcagccgcatgcacccagccctgagctcgggctctgggtgccctggagtctgccatgagggggtcttggggacaccgcagggtgaacagagaagacccaggagagaatatgggagactctatgaaaccaaaaagagggtggttcagaactggggggcgcagggggatgtcaaggtgggcttgggccaggagggggcctgagtcagtctttgccaacagggcaaccgagtcatagagtttatttatttatttgtttatttgagacggagtcttgctctgtcacccagggtggagtgcagtggtgcgatcttgactcactgcaacctccacctcccgggttcaagcaattctgtctcagcctcctgagtagctgggactacaggcacacgccaccacgtccagctaatttttgtatttttagtagagatggcatttcaccgcattggtcaggctggtctcaaactcctggcctcaggagatctactgccttggcctcccaaagtgttgggattacaggcgtgagccaccacgcccggcctattttattttattattaaagtattgttctttattttattagagacaagggtctcactgtgttacccaggctggtttcaaactcctgaggtcaagtgatcctcccactttggcctcccaaagtgctgggattacaggcgtaagccaccacacccagcctattattattattttttttttgaaatggaatcttaccctgtggcccaggctggagtgcaatggcatgatctcggctcactgcaacctccaccttctgagttgaagcgatccttgtgcctcagcctcctgagtagctgggattacttgcacgtgccaccacacctggctaatttttgtatttttactagagatggggtttcaccacgttggccaggctggtctcgaactcctgacctcaggtgatccacctgccttggcctcccaaggtgctgggatttcaggcatgagccactgaacccagctaagtcatacagtttcaatgaccttgtcattgaccctgggacgttgccattaacatggtgatcctcagctggccccattcctatggcggacctctaaaaacccaaccctgaccccagcccccagccatgcccccgactccctctgaccctgcccaaggttagcttctttatttatttattttttttgagacggagtctcgctgtgtcacccaggctggagtgcagtggtgcaatctcggctcactgcaacctctgcctcccgggttcaagcgattctcctgcctcagcctactgagtagctgggattataggcacacgccaccatgcctggctaatttttgtatttttagtagagatggggtttcaccatgttgaccaggctggtctcaaactcctgaccttgtgatccgcccacctcaggctcccaaagtgctgggattacgggcgtgagccactgtgcccggcccaggttagcttctgagcagtaaaactgggctcaacccagggctgtctgattccagaagccgtgctcctaacccctctgtcctcagtttagtagggtggctgggaacagtggtttccctgcaagctgcaagggtcaggggacagagcaggatgcggaagtggcaggtagataggattctttcagcagatatatctaagggccaagatctgtgctgggttctgggcatggaggaaaatcaggtgtgcatgatccgtccaaggcctgtgggcaaggatggcacaggaacagacatcccatgaccaatgacctacttgtaacaggtatgaaggaagagtggaaggttgcagagggacccctgctttagattggtatgacaggagatccaggagagcttctagaatgttctatccatcactagtctctagccctatgcagctatttaaattttgattttaattccggctgggcacggtgactcacgcctgtaatcccagccctttgggaggccgagggggggtgggggtggatcacctgaggttaggagttcgagaccagcctggccaacatggcaaaaccccatctctactaaaaatacaaaaaattagcggacgtggtggcaggcacctgtaatcccagctactccggaggctgaggcagtagaattgcttgaacctgggacgtagaggttgcagtgagccgagatcaagccactgcactccaacgtgggcgagagaccgagactctgcttcaaagacaaaacaacaattttttaaaaattttaattcaaatgaagtacaattgcaaatttagcctctgacttgcaccatcctgtatccagtgctcaaaagccagtgtggctggtggctgccatattggacagcatagatattgaatacttccatcgcctctagactgaagagatgggagcccaggggcagtgcaccgaggggaaggaatagctaaagcaaaggtctagtagcctgaaaaaacttggagaaaagatggcccctccatgaggccgagtgagaggaaggaagccttggctgggaccctgccacatccaatgtcaccggcagatgggtacacccccttttccccatgcatggattcagctgtcccacagacacattgactcaggcccttggaactacttcctgtcttgccttagcacgtagacatcacacacatgcatccactcaggtgggcagtctcaggccctgctcccactgctgtgctcagcgtgcatccagctcactcaatagatggtttctgagcatcgaggtcatgtcagccctggctctaggtctgtaggtgctggacctacagcagaaggcaaagacacagactggcaaagacacagcttgtatccaggttcaggggtcagggaaggtccctctgtgcaagcaaactgtggaacaacgggtggagcaggcccagcaagtgcaaaggcccggaggtgggaagcgatgcagatatggctggaggggagggcggacttcaagggccttggaggttgggagccactttcaggctgagcctcccggcttctctccccagcatcccggcggcgcaggcgcagaggagagcgagctgcaggcctacatcgcacagtgccaggacagccccacctccggcaagttccgccgcgggagcggctcggcctgcagccttctctgctgctgcggaaggttcgagtcccgggtctggcacattcagattggaggttagggaatggggaaaggggagcgagccagagaaaactgacgcccctcttccctgcttccttcctccagggacccctcggaggagcattcgctgctggtgaattgattcgacctgactgccgttggaccgtaggccctggactgcagagacccccgcccccgaccccgcttatttatttgtagggtttgcttttaaggatcggctccctgtcgcgcccgaggagggcctggacctttcgtgtcggacccttgggggcggggagactgggtggggagggtgttgaataaaagggaaaataaatgtgtcgttttcatttttagcgggaggagcagtccttgcgttaagcggtgtgaggccctttaaggcgcggccacactcagcatggcggcctcagtcggccttccaagcatggcgcggggaggaggggtgggagggtcgggagggactgcggtgcgactaggagtgaataatttaaaggggccgygcctgcggagccgggcggaacgctagcggtgttggcgcggagtggaccccggctgcggcccctgggtgagtctgggtttccgttagcctcgcaggggtgtcccttcgagggtcgttagcgagcctccgctttcccacgatctgtcctccgattcytgttaactctagactttctgatgttcccataccccccacgtctcggcaggtgtttccacaccggtagccagctgtgccctgaggtggaagaggaccggccacccaggaattttccaagtaacgactcggagtctccgggattcctatctcccggcccccgaatttccattaatattctagcgatgtcagaaacatcctcagcttcccagaaaaatcccagtaatattccagcatctctcagtatcttccaaggagcccggacgccctccccaggcccgctctcataagcaccccaggaatgtgcccacccacctcctggttttcccagcagtagtattgtaatcctcagaatctcagtaactttccagtgaccccgcatccccacccactaatcccagcgtctctggttacgcctcccagcaatggcgccaccatcggtcccggagtcccagtgatgctctgtgccatagagcccccataacttcactactacgtgatagtaaatccccggcaaaaaccmgcagcgccttgcaagcccacgccaccccaagcatcccaggactcttctgaaacgtgggtatcagacgccttccgcggatgccccggcagtactcccgtgcctcccagstcctgggtcttccccggggcaggcttgcgtcgggagccgagtatctaggtgcccactcccggaccccacggtttgcgggcccgttttcctggggtggggcattcagtcttcgacggagtagggggtgcggcctkgggggtkgggtggtcaggcttgatcaacccygcagagggcagtgacccgggaggaagtcaccaggtgcagaggaccgtgccctgtggggacctgcctgcaggctgctgacagtgggtaccaggtcggcctttggccccggggtggggttggacaggcgggcgtctggtaggccctacgcgtaggcgaagggagcaggaagccggggacccgcctcatctcctggccagggccgagaggtcggtttgctccatcccttagtcccgcagcgcccctctagcctcgcccctggcagctggagacgcttcccscgccaccccagagggcagggcttgagctgggggcagggcttgaggcaggggagaggtgggcccagattgacgacttgcacgggttccttcgactccttgatttcccaggactccgggctaccagatcggccgtccagctggaatcaaccgatggaggctccgctgcaaactggaatggtaaggggtggggcggagaccgggtaggtgccggcgtggggcgccaagaggactacaactcccggcgtgctcagcgsgcattacgtggtctggcgataacgcgctgcgtccgctcgggcggaactacgtttcccggcatgcactgcgggccgccgggcctcagggaagagtcgcgcccccggggagggagcagcactggcccattctgcagatggggacatcgagtcacgggctggctacgaactcctcgggggcgaaggtggcggagagggatgggttccaggacgtcctggcgcccggggaaggctcggcgggacggatttgcggtgcgcagccagtgccgttcgtccctcaggtgcttggcgtgatgatcggggccggagtggcggtggtrgtcacggccgtgctcatcctcctggtggtgcggaggctgcgagtgccaagtgagcacccgaggggcccctcttgggaggctgtatggtggggggcccaaatgcccgggtcccgaggcggcagagatggggatttgctggcgyctgttcgcggtaccccagctctggcagggtggagtctgcacagagctcggagtgcccctgtccccacctatccccagaaaccccagccccggatggcccccggtatcggttccggaagagggacaaagtgctcttctatggccggaagattatgcggaaggtgagtccgggacccctggggtccgccctgaccacacagaggccgcgccccttccctatttacacttcttagtgtccgccaccgctccttccttgatggagaccccctggatccgtctgcctyttctccaaggtctgaattagcaattcacccatctccgccttcattctcccaggtgtcacaatccacctcctccctcgtggatacctctgtctccgccacctcccggccacgcatgaggaagaaactgaagatgctcaacattgccaagaagtaaggctgtgctgggtgtgacctggtattaggggttatctcaggggccttttgagtaatcagcttacaccaaagtgttgtggaagtcttcccatattggctgcgcgctgtggctcatgcctgtaattcccagcactttgggaggctaaggcgggcagatcacctgagatcaggagtttgaggccagcctggccaacatggcaaacctcatctgtactaaaaatacaaaaattagctgggcgtggtggcatgggcctgtaatcccagctactcagaagggtgagacaggagaatcacttgaatctgggaggtggaggttgcagtgagctgagatcatgccactgcactccagcctgggcaatagagtgagactctgtctcaaaaaaaaaaaaaaaaaaaaaaaaagaagaagaagaagaagaaagtcttcctgtttcagagagacatctctggactctcctctcagagctcttccacaccagacatgctgtctctagggtatctcttccctgagggctacctcagtgaccttctccttccactggagtatctgagctatttgttcccaagtcaatatctcagaggtcttgccatatacttagtggrggggtctacatcaggggtttccatgtaggttatttcatgagtctcttcacatgagtggttttcttccagggtacctcactgaggtaattgtgtttctacgatctcctaaaggggctatctccagcctccagcctctcttctcygggggttatctcaggcatctctgtacatcagaaggcatctttcctatgttatggaccttgaagttcttcccacactaaggaggctgtctcaggagtttctgttccctaggggctatcttatgaattttcttgcactagaaatataggaaggatgcatcagagatccctgttggcagcaaggtctgcgagaaaggctctccaactctctttgcaagttgggtgctggctctgggatcccygtgcgtcatgtagtctacctggaggtctgcctcaagggtttcttcacaccagggcagggctctccatgatcaatagtcctgcaatggcagtcctttcttttttgtttgtttgtttgtttgtttttgagatggagtcttgctctgtcrctaggctagagtgcactggcacgatctcggctcactgcaacctccacctcctcggttcaaaagattctcctgcctcagcctcccgagtagctgggactacaggctcataccaccatgcccagctaatttttgcatttttagtagagacggggtttcaccatgttggccaggatggtctcgatctcttgaccttgtgatccgtccgcctcggcctcctaaagtgctgggattacaggcatgagcgactgagcccggccaatggcagggctttctgtgagttgagtagaaggactatctcaaagttccccatgatcagttgagggtctatacctcaggtttctccacatcacaggagctgtctgtagtgtttgcacactcttaagggactaccctgatatcttcatgattgtcagagggctgtctgagctttctgtgacctagggaagagttagcccaagatctccctgatcaaaaaaggaataatcataacaattataattattattattattttggagacaggatcacactttgttgttgaggctagagtgcagtggcacaatcacagctcactgcagcctttacctcctgggctcaagagatctctcctgcctcagcctcttaagtagctgagaccatgggcatgcaccaccatgcctggctaatttttaaatttttttgtagagatgggagtctcactgtgttgcctgggctwgtcttgaactcctggcctcaagcaatcctcccrcctcggcctcccaaagtgctggtattacaggcatgagccaccacgcccagccaaaaaaggaattatatctgaatttcttgatttcactgagtttaactcagggtcccatcctccaaggtctatctcagggatcttttgccagcggagggtctttctcagcaatcactgtgacttgtggggaagggctctcccaggtccacgattagcagaggggctatctggattctccacttataatgagggctacttcagggacctctgtggctgtcagaggggctgtctcaaggttctctgagactgggaggaaggtctatctcaggaatgtttatgtagaacagagagactgtatctgcggtcttctcatatattggaagctatgtcaaaggcatactcacgttaaggggactatctcaggaatctactctgtgactactggaaggaccgtttcaggacccccatgataaacacaggtaccatttctgggcctacccttatcttggaagctatgtcaggggtctgccttcctaaagggttcagctcaggggcctatgcctagtggaggggccatctcagagaactttaggtctggggtcatagggtttttccataaagggccagatagtaaatgtttcaggctttgctggccacatatggtccycattgcaactcttcaactctgctgcatgggagcagccataatgatatgcaaatacatgaatgtggctttgtaccaataaaactttatttacmaaaataaatgtggccagccgggtgcagtggctcacgcctgtaatcctagcactttgggaggctgaggcgggaggatcacttgagttcaggagtttgagaccagcctggccaacatggggaaacctcatctctactaaaaatacaaaaaattagctgggcgtggtggcacccacctgtagtcccagctacttgggaggccgaggcaggagaatcgctttagcctgggaggtggaggttgcagtgggccgagatttcgccactgcactccagcctgggtaaaagagcgagactcctgaggcagggcacagtggctcacacctttaatcccagcctttgggaggccgagtcgggcggatcacctgaggtcaggagttcgagaccagcctgcccaacatggagaaaccccatctctactaaaaatgcaaaattagctgggcgtggtggcacatgcctgtaatcccagctactagggaggctgaggcaggagaatcgcttgaacccwggaggtggaggttgcagtgagccgagatcgcaccattgcactccagcctgggaaacaagagcaaaacttcgtctcaaaaaaaaaaaaaaaaaaaaaaaggtggccagcctgatttggccagcgggccagagtttgctgtacatgagccctggggaaaggggtatgcgggggtcttaggtttgcctgagccttctccgtgcccccctcacccccggcacccctcccctcccaccaggatcctgcgcatccagaaagagacgcccacgctgcagcggaaggagcccccgcccgcagtgctagaagctgacctgaccgagggcgacctggctaactcccatctgccctctgaagtgctttatatgctcaagaacgtccggtcagtgttggggtgcargtgggggtggagggctgcagacgtggggccgccctgacctccagcctctgtcrcccaccgcctgtccaacagggtgctgggccacttcgagaagccactcttcctggagctctgccgccacatggtcttccagcggctgggccagggtgactacgtcttccggccgggccagccagatgccagcatctacgtggtgcaggacgggctgctggagctctgtctgccagggcctgtgagtgggcctccccaggggctgctgcaggaggatgggtggtggggatgggcagcaggcattggtctgtagagctggtggtctttggagatgcgtcatcgggagtcaggggaacgggtgaccgaggacatttggggtagtctgcgtagttgctcagtagttacaagtattgaacgatgggagatgcctgctcgttggaagggttggtgggttcccctgagaagggatgagaagtgtcagtgatcattgggatggatgagggggcgacatgccagtcaccagggcgaggccactgagggtccacggtctcctgtgtctcaggacgggaaggagtgtgtggtgaaggaagtggttcctggggacagcgtcaayagccttctcagcatcctggatgtcatcaccgtgagtgaccagtttctgaggcaggggggctggggtgcaaggtcccacccaagggactaggttgaaggaaatcacagggtccccaatctctggttcatccgttatgctgccgatggcccctcacgggactggcgccaggaaggattaggggagtagcgagggggactcgcagcctctgcccttgtctctcttcacgccctcccctcccccagggtcaccagcatccccagcggaccgtgtctgcccgggcggcccgggactccacggtgctgcgcctgccggtggaagcattctccgcggtcttcaccaagtacccggagagcttggtgcgggtcgtgcaggtcagtgggccttcgcctcctgtcaccccctgagggaccccaccctggcccccacccattccaggctccaagggaccgaggcccagcagccagcaggcgctggagctgtggttatcggcctggagcagccagatgtctgcagccgcggactcctcccttagctgcctcgccccatttccccagactgtgggtctctccctggttcccgcccgaccccttatgctgcgaactagcccggcccaccatctggccctgccccttaccccgccccatcttatggccacgcccctcgagccctgcagatcatcatggtgcggctgcagcgagtcaccttcctggcactgcacaactacctgggtctgaccaatgagctcttcagccacgtgagtgggtggcggggagcgagcacaggggggatgggggcgaggtctccctcccaggacaggccacaagctgttctctgcccccaggagatccagcccctgcgtctgttccccagccccggcctcccaactcgcaccagccctgtgcggggctccaagagaatggtcagcacctcagctacagacgagcccagggagaccccagggcggccacccgatcccaccggggccccgctgcctggacctacaggtacccagggacccgaggccagccgagcccaatctcccaggaagccccgtctcagccgccagcccctttttcagttctgcatagagtcaacctgaccttgtccagccccacagggactccatagcggggtacccaggtctgactcctatctggtaccgaggaagctstggcctcgtccccaagggcccattggaattgctttaackagttaatcagtcgccagcatctccttwtctcccaacctgctaatcctcctagtggctctgaggggcaggagcctgaacatgtgtctcccccaggggaccctgtgaagcccacatccctggaaaccccctcgscccctctgctgagccgctgcgtctccatgccaggggacatctcaggtttggagcactgggtctgcggggagggccatggagcttccaggtttgaatccaggtccaccgcctgccngtcttgattgttttaatctgcgaaatgggaacactgccagtacttccccaggcactgttttgtagatattcattgagatagtgcttctcccacctgttaagagggattcagagggagagtgcaggcgttgattagtcatgtctgctacagcagtggcccatggcacattggtatccattggtctcagactgcaactgtggttactctcatctttttcttttcttttgagacctgtctcccaggctagagtgcagtggtgctgtcatagctcactgcagcctcgaactcctatgctcaagtgatcctccagccccagcctcccaaatagctggaactacaggcctgcaccactacacctggctcattttttaaaaatcttactctcatctttatggtttttgttgcccccctgcctgcytgcaggcttgcagggtggcccccgctccgacttcgacatggcctatgagcgtggccggatctccgtgtccctgcaggaagaggcctccggggggtccctggcagcccccgctcgggtaaggcytgggaccctgcccggtggtggagcccgcaggggaaggtggctgggagggagcatcaggaggtcacaagcctgccccactcagacccccactcaggagcctcgtgagcagccggcaggcgcctgtgaatacagctactgtgaggatgagtcggccactggtggctgccctttcgggccctaccagggccgccagaccagcagcatcttcgaggcagcaaagcaggagctggccaagctgatgcggattgaggtgggcagccgaggggagctgggcacagggcgcaagggaggcctggctgcgcccatctcaacccccctacctccccaggacccctccctcctgaacagcagagtcttgctgcaccacgccaaagctggcaccatcattgcccgccagggagaccaggtgaggctgacccctgacctgtaaccatgccacctgagatcattccctatgacttctgtgacctctgatccctgccctttgactgtaagaccagcaccttctcccatagaagcagacctctctcatcctatcatttccaacctctaacccttgggtcctgtgacmcccaccccctaaccccaccctatgtcctctggacctgtcaacccttcacctgtgacccctgaaccttttgccctaggacyccaactcctagatctctcctgcctgccctggctcttcctgtaattctgttttctgaacttctgatcctgcagtattcactaacatgtctgcttctcatgctgaccgctgccaggataggggctcaataaatggctacaaatcgccatctggcctcggaaggccatgaaccagccctgggtcggggtttcagggccttgtggcggcacccaggwtgtgtaggaaaatgtatcctaccattctgtccactgtccatatggggaaactgaggcccatcaagggttagtgacccgactaccagctgaaagtcaggaagcctcagggtaggaggaggaggaggaagaagaagaggaaagttgaaacccacactctgtccccagagtgtggcagatgatctagaaagttctctgcttcctcatcagtggaatgaggtaataaagaagagatgcctagttcgcagaaccccagtaagacttcttttttttctttttttttttttttgagacggagtctcgctctgtcacccaggctggagtgctgcagtggcgtgacggtggctcactgcaagctccgcctcccgggttcacgccattctcctgcctcagcctcccgagtagctgggactacaggcgcctgccaccatgcccggctaattttttgtatttttactagagagggggtttcactgtgttagccagggtggtctcgatctcctgacctcgtgatccgcccgcctaggccttccaaagtgctgggattacaggcgtgagccactgcgcccggcctttttttktttgttttgagacagagtcttgctgttgtcacccaggctggagtgcagtggcacaatctcagctcactgcaacctccgcctcctgggttcaagcaattctcctgcctcagcctcccgagtagctgggattacagggttstgccaccacgcctggctactttttatatttttagtagagatggggttttgccatgttggccagccttgtctcaaactcctgacctcaggtgatccgcctgcctcggcctcccaaagagctgggattacaggcatgaaccactgtgcccagcctactgagacatttttgattgttaggatttcacagggtgctgttcctgacacctgatgggtagagatcagggatgctcaaatgtacagagcagcaggccggaaccatacagtccattatccacagtgtggggtttgcaagagtgacaagtggtcagggagggtgtttagcagcagcttatagggagcgggggcttgaggtgacagtgagctgtcataggcactgggaccccagctctgccccaggcttgggggagagaagcctggggcagggttggggtggggtgggagctgtggtcccactgttagccggctggagtgttgctgtgtcacttgacccagtgactctgctgtccccttgaaccacccatggcagggatgggctcttttctggagaggaagtcaaggcttttgccagctgttcttagaatagctgaggaagtaaggttaccctgtggcttctttgggggcccctgggccctgcttatctgggagactgctggccacaacccagccctggcctgtcagtgtaccacgctggtctgcagcccctcagagcttctctgcgttggcaggacttttgttagggaccctgtgctctcctgtgcttctccttgaaactttttttttttttcggagacggagtcttgctctgtcgcccaggctggagcgcagcggtgcgatcttggctcactgcaacctctgcctcccggattcaagtgattctcccacctcagcctccctcgaagctgggactacagtcacgtgccaccacgcctggctaatttttgtagttgcastagagatggggtttcaccatgtcggccaggctggtctcaaactcctggcctcaagtgatccactcgcctcagcctcccaaagtgctgggattacaggcgtgatcctcggcacctggccacagtctggaaattctgtcttagaaggttccagcatgtgtttatatctcctgggactgtgcctcacccaggggtccctgcagtgttttggcaggtggagcttcactgggtaccagacaggttggtgtggtggataaagaaggaatctctccatttctgggcggtttcagttccttatttataaagggatggaacaggaaggtttctagctggtcaggctacccaaagaagaaagaaacgtgtttacccagcatttgccccatctcgaactgtgtgctgctggctggacaagaggcaggaaaatggctgggcacggtggctcacgcctgtaatcccagcaccttgggaggccgaggtgagaggatcacttgaggtcaggagttcgagaccatcctggccaacatggtgaaaccccatttctactaaaaattcaaaaattagtcaggcacgatggcgggcgcctstagtcccagctmctcgggagcctgaggcaggagaatcacttgaacccaggagacaggttgcagtgagctgagatcgcacccctgcactccagcctgtgcaasagagtgagaccctgtctcaaaaaaaaaaaaaaaaaaaaaagtgggcagggaaaacccttagtggtccctgcccttgggcagcccaccgtattctgagagacatgactcaaaggattacacaaattcttgtaaaatcataagtgcttagtgtcacaaaggaaatgatcttggcactrcaaagtctggcttagacagggtggcacctctaagggcatgacctaagaaggaaggagggggaggaacaaactgggtgcaggtgggaggaaaggtcattctaggcagaaggaagagcttgtgcaaatgttgtgtggtgggaagaaataggttgatctctaagaaayaaaaaaggaagtcagtgggcctcaagtgaaacaatattttttgggggggtgtaatggttttattgagctataattcatgtactatacaatttacccatttaaagtatatactttaggctgggcacagtggctcacgcctgtaatcccagcactttggaaggccgcggcgggaggatctcttgagtccaggagttcgagaccagcctgggcatcatggcaaaacccagtctctacaaaaaacaaacaaaaaaaattagccaggcatggtggcgcatgcctgtagtcccagctacacgggaagctgaggcaggcataagccactgcacctggccatgcccacctaatttttgtatttgtagtagagacagggtttcgccatgttggccaggatggtcttgaactcctgacctgaggtgatccgcctgcctcaccctcctaaagtgctggaattacaggcatgagccactgcacccggccttatgtaagggcttctgtgtagacatatattttatttatttttttaaaggtggggtctcactatgtttcccaggctggtcttaaactcctgggctcaagtgatcctcccaccttggcctcccaaagtgcttggacatatgttttcatttctcttgggtatatacctaggagttgaattgctgggttataagccaattcaattttttttttttttaagagggagtctcgctatgtcgcccaggctggagtgcagtggcgcgatctcagctcactgcaacctctgcctcctaggttcaagcagttctcctgtctcagcctcctgagtagctgggattacaggcacacgctgccacgcccagctaatttttgtatttttagtagaaacacggtttcaccatattggtcaggctggtcttgaactcctgacctcaagtgatccatccrcctcagcttcccaaagtgctgsgattacagatgtgagccaccatggccagcctctatttttaatttttttaagcactgtgtgtttgtttgtttctttgctagactgttttccaaagcagcggcaccattttacatttccactgacagtgtatgtgaattccagtctctctacattctctctaaccctttgtaattctagccatctttgtgggtgtgaagtgtagtatstcattgtggttttgctttgcatttctctaatgacttgacgttgaacagctttttatgtgcctattgrccatttgtatatcttctttggagaagtttttattcagatcttttgcccattttactcttaytttttttagagacgggggtctcactatgttgcccaggctggtctccaactcctgggctgaaactatcaagcgatccttctgccttggcctcccaaaatgctgggattgcaggcgtgagccaccgcacttggcctttaatttattttagagacggggtcttgcactgtagcctaggctggagtgtagtgacgctatcatagctcactgcaacctcaaacatctaggctcaagcaatcctcctgcctcagcctccagagtagccaggactatagacacatgctaccatgcctggctaattaaaaaaaaattttttttttttttttttttgtagagacagggtttcactatgttgcccaggctggtcttgaactcctgggctcaagcgatcttcacacctaggcctctcaaagttctgggattacagttgtgggccaccacacccagccccttcagtatactttaaatcaggggtgtccaatcttttggcttccctgggccacattggaagaagaattgtcttgggccacacataaaatacactaacagttatagctgggcatagtggcacacacctgtaatcccagcactttgagaggccaaggcggttggatcactgaggtcaggagttcaagaccagcctggccaacatggtgaaaccccgtctctactaaaaatacaaaaattagccrggcgtgtggcaggcacctttaatctcagctacttgggaggccgaggcaggagaatcacttgaactctggaggcagaggttgcagtgagccgagtttgtatcactgcactccagcctgggcaacagagcaagacaccgtctcaaaaccaacaaaccaaaaaaccccactaaagatagctgatgagctaaaagaaaaaaaatcgcaaaaaaaaaaaatctcataatgttttaacaaagtttatgaatttgtgttgggccaaattcgaagccatcctgggccacgtgcagcccgtgggcagcagggtggacaagcttgctttaaatcatctcgagattacttataatacctaatacaatgtaaatgctatgtaaatagtcattatactgtattatttagggaaaaacggggaaaatagtctgtaaatggtctgcgcaggtgcaatttttttttcctgaatattttagatccaaggttggttgaatcctgggtatatggaacatatatatatatatacacacacatatatatacacacatatatatatakagagagagatgctgctcatctatatataatctatgtaaaaaaatttttctttttttttttttttttttgagacggagtctcgctcagtcgcccaggctggagtgcagtggcgcgatctcggctcactgcaagctcctcctcccgggttcacgccattytcctgcctcagactcccaagtagctgggactacaggcgcccgscaccacgccyggctaattttttgtacttttagtagagacgtggtttcaccgtgttagccaggatggtctcgatctcctgacctcgtgatccgcctgcctcaggcctcccaaagtgttgggattacaggcatgagccatcgcgcccggctaaaaaawatttttatatttatttatatttatatatagatggtgcttatatccaaagtctttattctctccttcatgtttctttyttttctttttttttttytgagacrgagtctcgctctgtcgcccacgctggagtgcagtggcgcgatctcggctcattgcaagctccgcctcccgggttcacgccattctcctgcctcagcctcccaagtagctgggactacaggcgcccgccaccacacccggctaattttttgtattttcagtagagacggggtttcaccgtattagccaggatggtctcgatctcctgacctcttgatccgcctgcctcrgcctcccaaagttctgggattacaggcgtgagccaccgtgcctggccttcttcttcttcttctttttttttttttwaagacagtgtctcactctgtcgcccaggctggagtgcaatggcatgatctcagctcactgcaacctcagccttccaggttcaggcaattctcttgcctcagcttcctgagtagctggaattacagacatgtgccacgacgcccagctaatttttttattttagtagagacaggtttcgccacgttggccaggctggtgccgaactcctggcctcaagtgatcccccctgcctggcctcccaaagcgctgggattacagccgtgagccaccgcgccctgcgccttyatatttttcttaacccttcctttcttctttaattttttcctgtgggggcatgttgacctgagctggggtccacgctgtccgggttctgtgttcatcacatcccctgcccgcacaggacgtgagcctgcacttcgtgctctggggctgcctgcacgtgtaccagcgcatgatcgacaaggcggaggacgtgtgcctgttcgtagcgcagcccggggaactggtggggcagctggcggtgctcactggcgaacctctcatcttcacactgcgagcccaacgcgactgcaccttcctgcggatctccaagtccgacttctatgagtatgacagcccgaagttggagtgtgggtggcactcggaggaccccaacccgtgggagtggccagaaccccatccctcaacctcactcctggaagagcagaagggagcccccagatctggcctcccagcgccggtgtaggacggttttgaggccttcctctttcatcccaagtctgttcctgcaggatcatgcgcgcacagcccagtgtggtgctgagtgcggcgcacacggtggcagccaggatgtcgcccttcgtgcgccagatggacttcgccatcgactggactgcagtggaggcgggacgcgcgctgtacaggtgcagctcccaccgcgctgctcaggcccggcctaggggtggggacctgggggtggtcagaccttgctgacctccacgcccactcaggcagggcgaccgctccgactgcacttacatcgtgctcaatgggcggctgcgtagcgtgatccagcgaggcagtggcaagaaggagctggtgggcgagtacggccgcggcgacctcatcggcgtggtgagcgcgacccccacccactgacctctggccytttccaggccagtccctcgacaackcacacacatcatcccgggtaatccagggagtggtgaatgcagctcccgacctctgaggtcacccagtccactccccgcccagacctcatttcgttggaaaaaggggattccgcctgtcgtggatccctgtcctctccctctccccagagctctaatgggtagcgagcgaggcttgcttccctacacccccattgcaggggagccctagatggggcagtacagccccctttccacccatcttcggcctcctcattccccacccaagcagccccaatcatgcacgcggccccccaggtggaggcactgacccggcagccgcgagccacgacggtgcacgcggtgcgcgacacggagctggccaagcttcccgagggcaccttgggtcacatcaaacgccggtacccgcaggtgcggcctgttgtgggcggggcagagaggcggaggcgggactccgggggggtgggggccgggcctagtgtgtgggcggggcttacagaggggcggggtcgagggaggggccgaagcgagagagtgagggcgggggctctcgggggtgggacccaggtaacgggcacccaggagccccggcataggagggagaggtgggacctggacagccgcttcccaggtctcactgaaatgccggcctccaacgcccccaggtcgtgacccgccttatccacctactgagccagaaaattctagggaatttgcagcagctgcaaggacccttcccaggtgagagccggccggcccagagcrtgctgggagatgtagtccggcgtccagagcatgctgggagggaagccttctttcctgagggatgctgggaaatggagttccgcgaagaaatcgtgcccctgagrgtttcaaaccctaagtaggaccsaggtgcagagcattctggggaatggagttcgtgttcctgagcatrctgggaaacgaagtcctcgacccctggcgtgctagttaatgggctcgaaagtaaatcagtggtgcyggggagggagtcttaggcggtggacttggcgtagtctgcccgggagtcagggcttgctggggaagtccacggcctggacgttgagagaaagggagtcctagatcagaatatgatggcagggccgtcatggtggctcatgcctgtaatctcagcactttgggaggctgaggcaggaggatcgcttgagcccaggagattgagtttgaaaccagcctgggcaacatagtaggacccccgtctctacaaaaatttcaaacattagctgggcttggtgacacatgcctgtagtctcagccactcaggaggctgaggcgggaggattgattgcttgagcccggaggtcgaggctgcagtgagccgtgatcgtgccactgtactccagccgggaygacagagctagaacctgtttcagaaaaaataaaacagcaaacaaacaaaactccccataccatgatggaaaatagtctgtggattkttgtttaggactctgggcacctcgccttctgaagttacagcttgctgggagatgtagccccctgtttcagcctgtggcttcagtgagctagaacagaatggggcgtgcggtggggttggaggcctgctgaaatgagggcctgagtttctacattgtggtggccagattctgggccagcccagcaacctagataccccttttccctccaggggytctacccaattggccctgagccctagatcccccaaggcgggggcagggcggtagtggcagaaaagacatcattaagaaattacagaggcctggggcggtggstcacgcctgtaatctcagcactttgtgaggctgaggcaggtgaatcacttgaggtcaggggttcgagaccagcctggccaacgtggtgaaactcatctctactaaaagtacaaaaattagtcgggtgtggtggtgggtgcctgtaatcccagctacttggacggctgaggcaggagaatcgcttgaaccggggaggcagaggttgcagtgagccgagcctacgccattgcactccagcctgggcaaccagagcaaaactccatctcaaaaaaaaaaaaagaaagaaaaaaaaaagaaaagaaaaggaaagaaattacagatagagaatacaatatctagaagacaaaagagggtcatcttgccgtgtggctgamagagggagggaggaagggagggagaaagaggcttttctaaggacagtgagctgagacttgacaactaagatggggccagacatgaaagagaaaccaggggtgctgcacaggaggctggtggttttgaagcactgaggaggaaagcgatcaaggggagaggtgrtgggggttggggggtaagtcacataggggctaggggctgtggacaggcacttgagcttatttagattgttattgttagattggggaggaaggattccaccagtaaggaggcaacaagaggtctaggcaagatatgggagttgacagctggtctaggctgttastggagaaactgggaagcaacagctgggtcaaaagtagcttttcttttcttgtctttgtcttttcttttattttctttttaagacagggtctcgctctgtagcccaggctggagtgcagtggcacgatctcggctcactgcaacctctgcctcccaggttcaagtgattctcctgcctcagcctcccaagtagctgggattacaggtgtatgccaccatgcctggctaattgttgtgtatttttagtagagcagtgtttctccatgttggctaggctaaaaatagctttatttctgcctcgttttatgttcagktcccccattagacagaggaaccaaggccagaatgaggcaggggcactggccaattgatctcccaagcacagtgaatctgaatggttgtagagttgtgtaatggatcccactgaggtgatcagggcccaaagyggagggtagatggccaggttttaacaaaagagggaatagtagttgaggctgagggtccaggaccagagccatggctttctgtatggtagagtcaagactttgggcaactgggggctgcagtctgggagcacaggagcargaatttcagataaggaggaagaggaagaagaggaggaggagggttcatctctctggacacaggttcgcaccacaaatctcatccattgggttcttagcaggctctgggttgggtgtgcccccacactcggaactcaccaacccagccagcaacctggcaactgtggcaatcctgcctgtgtgtgctgaggtccccatggtggccttcacgctggagctgcagcacgccctgcaggccatcggtcagtggggtgagggtcatgggtgggggctggcggtgggtgggacattagtgagtgagagatgttagggtaggtcatttggggggtggaggggaacagggccacaggggcggggtaatgggtattcttttctgagttaggccccagccctgtggaccatggttcccagcctcccttccccacctacccctaggtccgacgctactccttaacagtgacatcatccgggcacgcctgggggcctccgcactggataggtgtgtgttgcagaagggagtggggagggtggtgggtgggsctggagcctcaaattctttcagacctgagntcaagttctyggcttccaaccacggagcctgcgtcttacccataggtcaatggggagattcgcagtggtgtgaatctgcccaccggagcacggacttccntggtggggstttgggtgtctaagttcctcccagcaacggagctatgtggtctcggggagcacactgaccccaggccaaccccaggatgacgctgcccccttcccaccctagcatccaagagttccggctgtcagggtggctggcccagcaggaggatgcacaccgtatcgtactctaccagacggacgcctcrctgacgccctggaccgtgcgctgcctgcgacaggccgactgcatcctcattgtgggcctgggggaccaggagcctaccctcggccaggtcggaagcccgtgccccctgatctcacccacctcggvncccgtcctttgccctcccgtgcctgcaccaggccacgtgcaccctcgccatrggggtaggcgatcagggacccaggtgtggccaggtggtggtggggcggctggtgacctcmgccgtccgtattccgcagctggagcagatgctggagaacacggctgtgcgcgcccttaagcagctagtcctgctccaccgagaggagggcgcgggccccacgcgcaccgtggagtggctaaatatgcgcagctggtgctcggggcacctgcacctgcgctgtccgcgccgcctcttttcgcgccgcagccctgccaagctggtgaggagcgggccggcccccaccttctaggggcgtggctggtgggcgaggcttgggagactggggcggggcctgggagggctgaggacaggctcgaaggtcagggtacccctgggggatccgccggaccccgccctcatgctcctgggtcgcgrctatctcccccatcccagcatgagctctacgagaaggttttctccaggcgcgcggaccggcacagcgacttctcccgcttggcgagggtgctcacggggaacaccattgcccttgtgctaggcgggggcggggccaggtgagggcggggcttgctctctgggggcggggcctggatgtccgagggtggagcttcctgggagaaaccgtgggggcggggcctgggtgttcgagggtggagcttcccctccgggagagaccccgtgggtaggggcgggtcctttgttccttagcagtgcgggaggtgggaggaggtaggggcaggggagttcctgcaggtggggcctagcgggtcactggggcccattttcccggcaggggctgctcgcacatcggagtactaaaggcattagaggaggcgggggtccccgtggacctggtgggcggcacgtccattggctctttcatcggagcgttgtacgcggaggagcgcagcgccagccgcacgaagcagcgggcccgggagtgggccaaggtgtgtgttgcgaggagggattgctgcaccccaggagtgccataaaacccgtggttccaacctaacctgatcccatgggggagcctccggggtcagggtgacccttcctgattaaatctrtgatccccagctgtccggacttttatagataagcttctaggactctgggtaaccactttgggacctcctgtctactgaccctaacccataacccccaacgagagcacccagggcccttggtgaccaccttgtggatggccttggrtgaccacatcatccctaagtgttccttttttttttttttttttttttttttgagactgagtcttgctctgtcrcccaggctggagtgcagtggcacaatctcggctcactgcaacctccacctcccaggttcaagtgatttatccgcctcagcctcatgagtagctgggattacaggcacgccccaccagcccggcaaatttttttgtattttagtagagatggggtttcaccatgttggctaggctgcttttgaactcctggcctcaagtgatctgcccgccttggcctccaaagtgctgggattaccagtgtgagccgctgcacctggcccctaagtgctgcttgctcaccccctattgatgaaccttatctgtgaccccatgtaactcctatttgaccctgtctggccccttgtccctagagcatgacttcggtgctggaacctgtgttggacctcacgtacccagtcacctccatgttcactgggtctgcctttaaccgcagcatccatcgggtcttccaggataagcagattgaggtaggcccacctcatcccctgccctgcctacccctccccggaggagccccctgctcctcccccacctcgatccctgtccccgcaggacctgtggctgccttacttcaacgtgaccacagatatcaccgcctcagccatgcgagtccacaaagatggtgggtgtccccgcccagcctgcagcaaccgctgacgycacgtggggttggggggatgcttccgggagggccgctgagcttctgggacgttgttaacacgagtgaccgtccaccctggcccgatcaccgaccactaaccgccacccactaatgccccggagaccccaggtacgtccgtccttgggggaggggagcagggagactcgtcggacgccttacccccctcacgccatccccgcaggctgtgtgtggcgttacgtccgggccagcgcctcctactgcccctacctgcccccactgtgcgaccccaaggacgggcacctgctggtggacgggtgctacgttaacaacgtcccaggtcagcgagcccntcrggccggctgggcctccggcgtgtctgagcgtgtctgtgcgtgtttgtgtctgtgtgtcccaccgcgcaggctccctgtggcggtacgtgcgcgccagcatgacgctgtcgggctacctgcccccgctgtgcgaccccaaggacgggcacctactcatggatggcggctacatcaacaatctgccaggcaagtggccgcccgcaccacccgcacacgcaagcacctcccgcaccacacacacrcacacgcgtgggcacacacagacaggctcgatgacgggacacatgcccaagctgcccatgcaggggtgcagacacacatgcgcacacatacgatcacttgcacaaaatgatacatgaatgtgcctgtggacagcgacatgtgcagttgagatctacattctggccaggcgcggtggctcagcctggaatcccagcactttgggaggcctgaggtgggtggatcacctgaggtcaggagtttgagacccgcctggccaacatggtgaaaccccgtctctactaaaaatacaaaaaattaaccaggctggtggggtgtgcctgtaatcccmgctactcrggaggctgaggcagataaatcacttgaacctgggagttggaggttgcagtgagctgagatcatgctactgcactccagcctgggcgacagagcaagactcagtctcaaaaaaaaaaaaaaagaaagaaagaaatctacatctacctgctggcgtgctgtgttaagcacaagtggatgtacgtacaagagggacaggtgcacacgtccacacacacatcaggggacatgcaggtggaatgcaacactcgtgtgcacaccagctatataygcamatgctttctctcaggggcaggtagggcttacacacacgtgtacacacaggcacatgtgcacagatgaacacgtgtgtcagtgaaatagggcatttgccaaygcatgccagtctgtcccgtttgtcctgcacrttccctcaaacacgcagggatgtgcacacacgtagataggatgyggcacctctgaccgagttaagtcatgcytaccacctttatgggtgcaggtgagaagcgggcaggtacacaacttaaaatctcacaccccagaagtgtgcatatatgaacagacatgtacrccaactgcacacatgctcacaatcttgtaggccaggggtgggcaaactatggcccacaggctgagtcctgccctctgtttgattgtataaataaagctttattgagctgggcacagtggctcatgcctgtaatcccagcactttgggaggctgaggcgggtggatcacttgaggtcaggaattcgaggccagcctggccaacatggtgaaacccggtttctactaaaaatacaaaaattagctgggcgtggtggtgtatgcctctaatcccagctactygagaggctgaggcaagagagttgcttgaacccgggaggtggaggttgcatcgagcccagatcgygccattgcactccagcctgggcgacagagtgagactctgtctcagaaaataaaacaaaacctcccaacacctgacccccctcctcaacttcagttgcatcatttgcacgyctgtgcatgacagcatggtgtttgcatgtgtgggtattctctcttttttttttgcgtgatcatttgcatgatggcatctgtgggactgggttgaacatctctgccccgggcccccnaggggagcagcccgctgacccccctggccccacagcggacatcgcccgcagcatgggtgccaaaacggtcatcgccattgacgtggggagccaggatgagacggacctcagcacctacggggacagcctgtccggctggtggctgctgtggaagcggctgaatccctgggctgacaaggtaaaggtyccagacatggctgaaatccagtcccgcctggcctacgtgtcctgtgtgcggcagctagaggttgtcaagtccagctcctactgcgagtacctgcgcccgcccatcgactgcttcaagaccatggactttgggaagttcgaccagatctatgtgagtgggcaggagtggcatggtgcctgcataggtggtcyngctaagctttgctacttaaagcccagagtggtatgagggggaggaatccaggaggaatccaggaatcccatctggaatctctggaaaacagatcagtgatcaattggtgatgtctgcaggggatgtagtaggggtgtggctgtgcatgtgctgtgtaagaactttctccttataggccagctgcacccctggaagcactgtatagtgatttctactgccatttctgcattggtgggaatgagaatagtgatgaagyagaaatgtctgccacagttccaggagagggaggtagcagtgygtgtgttatgtgcyactgaccctgaaaaatgtgccatagcccaagccaattgaaattgatcagggggccaggcatggtggctcatgcytgtaatcccagcaccttgggaagctgaggtgggaggattgcttgaaaccaggagttcaagaccagcctgtgcaacatagcaaaaccccatctctacaaagattaaaaataaaaaattagctgggtgtggttgtgcatgcctgtcaccccagctacttagggggctgaggtgggaggaccgctcgagcccaggagtttgaagctgcagtgagctatgattgcgtcactgcactccagcctgggtgacagagcaaaactctgtctctaagaaaaagaaagggccaggcatggtggctcatgcatttaatcccagcattttgggaggccgaggtgggcagatcacttgaagtcaggagttcaagaccagcctggtcaacatggtgaaacctcatctctactaartatacaaaaattagctgggtgtggtggcacatgcctatagtcccagctacttgagaggctgcagcaggagaaatcgcttgaacctaggaggcagtggttgcagtgagccaagattgtgccactgcactccagcctgggtgacagagtgagactctgtctcaaaaaataatattaattttaaaaattaaagataaaaatawtaaaaatttttttaaaaagaaagaaattgatcagtagctgcagcccagaagccctgagtctgagaagagatgtgtgatgtcccttgtgggctcactgggatagcatgccatgagaaattcaagatgtttgctgtgggcttggggatggcgacatccacagatgtactgcctgtttgcagacttcaaaataagctcacacatcaccaccttgtgttatttgctacccagcaccctgcatggggctgtgtgggaaagaacatggagagattgattggtaatgtctgtcaagggcaggacagnggatgtgtaggcgagtgtgctatgtgcagctgactctgaaataggtttagtctcaaatgcaactcccccagagaatcaggcttttgaggggccagagaatgggcagacagagtggggacaagcaaagcagggttgcagacatggacccagcccctcatttcccacaggatgtgggctaccagtacgggaaggcggtgtttggaggctggagccgtggcaacgtcattgagaaaatgctcacagaccggcggtctacagaccttaatgagagccgccgtgcagacgtaagcctgtgatgcccccagggccactctgactccactgattacagaacccaagcccccttaaagtctcccygaaacctcagatgaccccacatgtccctgggttttgctgagctctcagacctctgctgacttcagagagttcccaccctaggatctcctctgagcccccartgcaccactgggccccccaggggccccaagactctgtgggccccccctargagcctcaccagtgtcaccccacaggtgcttgccttcccaagctctggcttcactgacttggcagagattgtgtcccggattgagccccccacgagctatgtctctgatggctgtgctgacggtgaggggcccaggggacccccaagagggaggggagtggctggagatggcaggccagccccaatcccctcancygtgccctgctccccgattccaggagaggagtcagattgtctgacagagtatgaggaggacgcyggacccgactgctcgagggatgaaggggggtcccccgagggcgcaagccccagcactgcctccgagatggtgagagtgggtggcccagggtcccctcacatcccccagagggtcatgagtacagtgtcaggcaggggagcsgggggcgtatttgagatcctgtgtgtgctgggtgctggctgacatgtgacgcatcagtgtcccgtgctgggtgacgtgtgtgtgaccttccctcgcaggaggaggagaagtcgattctccggcaacgacgctgtctgccccaggagccgcccggctcagccacagatgcctgaggacctcgacaggggtcaccccctccctcccacccctggactgggctgggggtggccccgtgggggtagctcactccccctcctgctgctatgcctgtgacccccgcggcccacacactggactgacctgccctgagcggggatgcagtgttgcactgatgacttgaccagcccctcccccaataaactcgcctcttggaaatggcttcctgtcgttttcggactggggacccaccttctgtgctcaggatggctggggctggggtctgacaccacctggtgcttgccccccacagggaatgcctttctagaatccacacggagccccactaggtgcttgtccccactctgccccttctctggctcctcagaagccagtgctgactccggaccacagggccagacattccgtgccaccctcccgggctcacaggtgctcttgggggcccgatatggcacccctcaatttctttctgtgtgttttttgttttttgtgtttttttttttgagatggagtctcactctgtcacccaggctggaggctggagtgcagtggcatgatctctgctcactgcgacctccatctcccgggttcaagcgattctcctgcctcagcctcctgagtagctgggattacaggcgcccgccaccacacccagctaaattttgtgggggggttttttggttttgttttgttttttgttttaatttttgagacagtgtctctctctgtcacctaggctggagtgcagtgatgcgatctcagcttattgcagcctccagctcttggattcaagtgattctcatgcctcagccttccaagtagctggggccacaggcgagcaccaccatgcctggctaatttttgtattttttgtagagaaggggtttcaccatgttggccagtctggtctcaaactcctggcctcaagccatccacctgcctcagccttccaaagtgctgggaatacaggcatgtgccaccacacctggccttaatttttgtatttttagtagagacggcatttcatcacgttgcccaggctggtctcaaactcctgacctgaagtgatctgcccgccttggcctcccaaagtgttgggattacaggcatgagcctccttgaccggccagaacggtttatcttttttatgagtgaataatatcccattgtgtagatggaccacatggtgtttattggttcatctgttggacgcttgagttgcttccaccttttggctatggggagtcatgctgctgtgaacacaggtgtacaactatctggatccctgctttcaacttccttggctagatgcccgggagtggaattgttgggttacatggagattctgtgttgaattgaagaaacgccaaacttttccatagcggctgcaccattttaaattcccaccgactgtcagtgcctcgagctgtcagcaccatggacagggatggtgctgtccgaggtgctactgacgccccctctgtgtctttccctccaagcccccccacccctccgatatccctgcgccctccagatctctgagttttgagggtggagggggacatttaggggaaagttcagtccatagtttggcacctactggtgtctgtatcttaactggctccccttccatcctggctcacaaggctccagttgtaccagccttcattctattcctcaaattctccatcgattcctggctcaaagcacagaattgggctttttactccctgtgtagctgattaagcctgtcctcaattgtcacctcttcggactgtgtacagtaacttccctgttcccgttggcccctgtctccttgcctttaaagcacttcattagtcacagttgcttcacttgtttttattgtttcattggttattattactattattattattattattattattattattattattattattttgagacaagatcccactctgtcacccaggctggagtgcggtggtgtgatcacggcttactgcagctttgacctcctgagctcaagtgatcctcccacctcaacctcccgagtaactgggactacaggcgcgagtcaccatatgcagctagttttttttttttttttgtagatatgggggtctcaccatattgtccaggctggtctcaaacttctgggctcaagcgatctacctgtcttggcctcccaaagtgatgggattacaggtataaagtgttgttggtgttgttgttttgtttgtttgtttgtttgtttttgagacagagtttcactctgttgcccaggctggagtgcagtggtgtcatctcggctcactgcaacctctgcctcccgggttcaagctattctcctgcctcagcctcccaagtagctgagattacaggcaaccgccaccacacctggctaatttttgtatttttaatagagacggggtttcaccatgttggccaggctggtctctaactcctgacctcaggtaatctgcctgcctcagcctcccaaagtgctgggattacaggtgtgagccaccacacccggcctaaagtttttaattaacttttttttttttagagacaggatctcactctgttgcctaggctggagtgcagtagtgaagtcatagctcactgcagcttcaacctcccaggctcaagtgatgctcccacctcagcctgccaagtagctgggactacaggcaagcaccaccacacctggataattttttaaaaaaaattttggtagagacaagggtctcgctaggttgtccaggctgttctcaaattccagggttcaattgatccttctgccttggccatccaaagtgctgggattacaggcacgagccatcacatcaggcctcacttgcttacttgtttctcatctgtctctgcaagacacacttaaatataagttccatcactggaagaaccttgcatagaacagcacctggctcatggtaggtgctcagtaaatgtcgaatgacatcaagctccaaagacgaagcaaagatccctgagataactcccattctctctctttctctctgattttgttttgttttattttgagatagggtctggctctgttgcccaccctggagtgcagtggcgccatctcagctcactgcaaccacgcccaggcttaaaccatcctcccacctcatcctccctggtagttgggaccacaggcacatgccaccacacctggcttaatttttgtatttttgatagagacaaggttttgccatattgcccaggctggtcttgaacctgggctcaagcaatccaactgcctcagcctcccaaagtgctgggattacaggcgtgagccacctcacccagccgacaatacgtttttgttgctgaagtcaccccatctgtggaactttgtgacagtgaatcctagcaaattaacatagaagcccttggctagactcagctgccatgatgtggatggtgtaatggatcaggcaggacaagtcaggttatgccgctgtaacaaataacaccaaagtcttggggggcaaaaacaatacaaaagtaatttctgagctgggtgcagtggctcatgcctatagtcccagctacttgggaggctgaggcaggaggattgcttgagcccaggagtttgagaccagcctgggaaacatagcaagacctcatctctaaaaaactttttaaaatcagctgagcatagtggcatgcacctgtagtctcggctatttgcgaggtcgaagcaggagaatcgcttgagcccaagaattcgaggctgcagtgagctatgatttcaccactgcactccagcctgggcgacagagtgagactgtctctaaaacaaaagtagtcactatctggaatgttttgggtcactgtgactgaggaaagacatctctggaaggcctcatacccatcattaaatactctggtccagaaatgatgcaatacttttatctcactgctcattggctagaaaaagtcacatggtcctacccaactgtaagtggccaggaaaaaacagccctaccatgtgcccagaagagagagcattggaaatatttggtgatcatcactaatgatcaacaggctgggctgcagtagctcacgcctgtaatccaagcactttgagaggccgaggcgagtggattgcttgagctcagtagttcgacatcagcctgggcaacatggcaaaaccccatctctatcagaaatacaaaaaattagccaggcatggtggtgtgagcccgaaatcccagatcctagggaggctgaggtaggaggatcacttgagccaagggaggtctaggctgcagtgagccatgatcatgccactgcactccagcctgggcaatagggcgagaccctgtctcaaaaaattaaaataaaaacaaacaaaaaacaaactattgactaacagagttggaactgagcctcaactggaccttcctggactctctaggctacccctctctggttccagagcttgagactcagctagcgccaagaaattttgaggttacagtgaggacctgggttcagggtcaggggccctgtcctgcaatccacaggagctggccacgaggtgtggacccaagagactgataaagtcacattctcaagagtgttttcttggtctctctctctctgtctctctctgtctctctctgtctgtctctctgtctctctctccccctctccctctccctctcctctttttctttctttctttgacagagtctctatctgtcacccaggctggagtgcagtcgtgtgatctcgccttagcgcaacctccacctcctgggctcaagtgattctcccacctcagcttcctgaatagctgagattataggtgcatgccaccatgcccagctaattttctttttaattcttagtagagatggggttttgccatgttggccaagctgatcttgaactcctgacctcaagaaatctgcctgccttggcctcccaaaatgctgggattacaggcatgagccaccgcacccagcctcttggtgtgtttgttgcccagtgtctggaaatggccatgtagaggttggacagggaagaaccaacctggtcaggctgtaggacatcttttggccacccaggcccagtgcagtggctcatacttgtaatcccaacactttgggaggccaaagcaggaggatcgcttgaggccaggggttcaagaccagcctgggtgacatagcgagactctgactctatgaaaaatattaaaagtagctgagtgtgagggtgggcttctgtagtcccagctacttgggaagctgaagttagaagatcgcttgagcccaggagttagaggctgcagtgagctataattgcaccactgcactccagcctgggcaacagagtaaaaccttttataaaaataatattaataataagtttaggccaggcacagtggctcatgcctgtaatctcagtactttgggaggccaaggcaggtaggtcacttgatgccaggagttggagaccagcctggccaacatggtgaaaccccttctctactaaaaatacaaaatagctggatgtggtggtgcgtgcctgtaatcccagcttcttgcgaggctgaggcacgagaattgcttgaacctgggaggcagagattacaatgagccgagatcatgccactacgctccagcctgggtgacagaataagcctctatctcaaaaaataaataaacaaattaaaaaaaataagaggctgggcatggcggctcacacctgtaatcccagcactttgggaggctaaggcaggaggattgcttgagcccaggagtttgaggctgcagtgatctattatcacaccactacactccagcctgggtgacagagcaagaccctatctctgaaacaaaaataataacaaaaaaagcaaaaaacagggaattttcctttccttctttattgccagaaaggaaaaaaaaaatcagggtcctacatttgcacagattggcaggttctgcccattgctagccagctgaccttgggcttcccttcccccattctcaaatttgtcacctgtgtattctacctaattttagtcccagtgggttgctttgtaatttatctttatttttatttttttgagatggagttttgttcttgttgcccaggcttgagtgcaatggcatgatcttggctcaccacaacctccgtctcagctcaccgcaacctctgcctctggagttaaa

SEQ ID NO: 94989 - DNA, 43350 bp, Homo sapiens
atcagataaacatttatgcatccctattgtgctatggaaatgtaagatgttaccataggaggaggccgtgtgaagggcatacaagggattctttgtactatttttgcaacttcctgtgtgtctgtaatcattttaaaatacatattttttaaatgatggatgtctactggatgccaggcattgaggagcacactcagtgcaggcttggtctgacactctatgacctgggcaaggaggctgatcaatacacaaataactgaacaaagatagtctgcattacaaggtacaaagtgctctggttgtgtgggagtaagagggatcaaactggaagaatctgagaggtcattttagagaaggcagaatttaagtgtggaatctgagtgatgggcagtgtgctaggaataataagggatcgagggtactccccaacagggaacaaatgagagtgggtttggggacagccaatgggcccacacagctggagcatgagacttagggaggagaattggggaagagatattagggaggtaagactaggaaggtagaccgggccctcaaatgccaagtgagggaagttggactttatcaaaggcttctgaacaagggaatattttattagttttagtaaatttagtacaataatttttttcataatatttagaatggactggaatggcacaaaaccaacatgatatatagaaactggactgttccatattgacaaaagtacccactaaagtcctatatttaatacatgtaagttattaggtggcattttgcagtcgttgggaacataagctctgaaatcagactacacgggcttgaatcctggctttaccactatactagctgtgcagccatgggtaagtttttgaacctcactgtgcttcaatttccttatccataaaatggggataacaatggtctacttcatagagtgtttgtgaggagtaagtgaaataactcctgatgtttagaacagtgcttggcataggatagaaactcataaatgtgagctactatgttaattcaagataagggggaaacattgtatatatcaatcactatgtaacaaaccatgaaaatggaggggagccatgattcaagaaataaaataataggaaatctctaatatacttttttgacattagagtatgttagagtggggtaaggtagaagaaataaacatggctttagtatgtcttgaattaatttgaaatttccaaaaattcagcaaagaagcacatgggaaaatcaatttagagcatgatgagtagtttaaaaatggtttctatatttattaccttcactttttttttttttttttttgagacggagtcttgctctgtcgcccaggctagagtgcagtggcgcgatctcagctcactgcctcctccgcctcccaggttcactccattctcctgcctcagcctcccgagtagctgggactacaggtgcccaccaccacgcgcggctaattttttgtatttttagtagagacagggcttcaccgtgttagccaggatggtctcgatctcctgacctcgtgatccacccgccttggcctcccaaggtgctgggattacaggcgtgagccaccaagcccagcctactttcactatttttaaattatgacatttcatatttgcaaaatatacaaatatgccatctatatctatgtagatatatagttatatagattgcataaataatagtaaaatgaacatgttactactactcagttaaaaaactgtgattgagacagcttgatggccccccgcaatacccactctctcacttttcaataataatagaaatgttttggccggttgtggtggctcacacctgtagtcccagcattttaggaggtcaaagcaggaggatcatttggggtcaggcatttgagaccagcctggccaacatggcgaaaccccatctctactaaaaatacaaaaattagctgggtgtggtggcacatgcctrtagtctcagctactcaggatgctgaggcaggtgaatcacttgaacctgggaagaggttgcagtgagttcagattgcgccactgcactccagcctgggtgacagagcaagaatctgtctctaaatagataaataaataaataaataaacaaataaaagaaattttagctgggcaggtggctgtctggctaaagattgcatttgcaggctcttttacagttaggcatagcagccatgtggccaggytctggccaatgggatgagagcagaagtgatgtgtgcaacctttgatcatggccttcagaagaaaggagcatagcagccccttctctttttccccttcctattggttgggagtcatggccagccatttttgatcacaaggacaagggcaacatctgaaaggcggcagactaataaaatggaagaagtctgtgtctctgacaccatcgarctgccatgtagccctaccatgcctacccagacatcaatgtgggaaaaataaacctctattccatttaggttgctgtagtttgcccagctgtagtctaaaaaattaccaatacctttgaaacttgccatgtgcccctctataattgcatttaccttcctttctatcaggagtaaccactatcaggattgtacttataattcttttccttttcttcatagctttgccacatgggagctgcaaagtgcagtcacatgtttttgaagtttacataagtaaaataatactgtgtgtattttgcctatggcctgctgttatggacagaatggtatcctgcccctgctccacccccaattcatatgttgaagccgtaatcctccacaatgtgatggtatttggagatggagcctttaggatattggatatcatgagggtggggccttcatgatgggattagtgcctttataaggactttataaggagacaccagagagcttcctctctttctctctctgtctgccatgtgaagacatagaaggtggccatctgcaagccaggaagagagttctcactaagaaacacactttgactttggacttcccagcctccagaactgtgagaaataaattcctgttgtttaaactattcagtctacggtattttgtcatgacaatccaagctgactaatacatctgctttttttttttcactcaacatatgcttgtgcaattcattcatgttcataagtgtacctatagttcattaattttttactgccatattaaacttgctatataatattaaattacttgaaaataccagtttatttacccattcaatattagtggacatataagttatttacagcttttagttattgtacagacaaaggtgtcatgagtattcttatacttatctcctaggatacatgtgcaagaatttctttaggatctgtttctggatcagaattgtggtgtcagagtacacacatcttcaacttcaccagatcatgccaggttgtttttcaagtggttgtaaccatctactcttcctagcaaacacttccacttgggtacgccacataattaagttctggccaatgagatacataatacaacagtccccttatctccagagacatattccaagacccacaactgttgcctgaaactatggataatgccgaaccctatatgtactatattgtttctaataaccaagatggctaataaatgaataaaggacaggtggcttatatagcagggatacactggacaaagagatgatgtaagtcctgagtggagaagagtgggactgggtgagatttcatcacgctactcagaatggcatgcaatttaaaactcacactttatttctggaattttctatttaatatttttggactgtggttgactgtgggtatctaaaactgcagaaaagtaaaaccagggacaaagggggactactgtatggagaaatgttgtttgggagttttggagaggcaccccagtttgctcaccagccagtgatatctactttttgtttttcctctcctcttcctccttcctgctgcttgaaacacaaataagatgactggagcttcaccagccattctgaatcatgagatggccttatagatacaagtcagagaggatattggaacagagagacagaaaagcctgagttcctgatgaccatggaaacatcgtaccagtcttggggtgccaattctgtacttcttttatgtgagagagaaataaattcctgttgtctaagctattcagtctgtggtattttgttatgacaatccaagctgactaatacacctgcttctttttttttttcagtcaacatatgcttgtgcaattcactcatgttcataagtgcaccctggaacattaccatgttccagggcttctcctatagaaacagaacatagcccagttgattattttttattctgattgatttttaggagttctttacataatctgggttctactcattgtgggttttgagggaaataccttttcccagtttatggcttgtcttttcattctcttgatgacgtcttttgatgtacattaaaaattatctttaatacagtgaaatcggctaatctagaaaaggattttttccttggactgttcatggcatcagtaaattaaaaagtagttactgtcaagttcactgcacataaaccagcattgttaaaagtggatctccatcattccatttcttttcctgcatttgtcagcatcgtttttcacactaaagatgaggagatccatattcctaagacatatacgcttggtctgtagagaccctcattgctctaaggcagtggttgccagttttttccttaaagggcctagtaggacatagtccaggctttgccagccatatggtctgtcacaactgaattctgctgcccttgtagcatgaaggcagccaaacaataggtaaggaataaacatggctttattcgtggcactgaactttgaatttcatataatttcacatcacaaaattgtattcttttgattttttccaatcatttaaaaatgtcaaaaccatacttagctggagggctgtaggaaaacaggtggtgggctgggtctggcacacaggcagcagttcgtggacccctgtgccaagtgtttgacgaagcccgtgaggcaaactgcacttgccgatagaggttgcgccacacaagtgtcttggaagcaatttctggcttgtcctaggccttagaaagtgcgtgcagatcagagccatgaagtgaagagcaaagcaagtgacaggcctgtctcaggttgtgcaacagaacgtgtttatgacagatgtcccctgtccaagtgagtgcactgtgagataaggggccggtgacctaccaatgcgtgtggcaagccagcctgttcccccttgcagggggaggacactcctgccctttattccagggaagagtatgtgtaaaaatattcacccttgttggtatcaaatgcgctgaagaaaataggtatcggggtttcagccattcggtctccttgttagtgtttctaagccctgattttcagtttcaaaaccttggtctctgaatccgcagtgatgggtctctagagcgaatacatggcagggccgccttcctccgtacagaaagggagaattgtgcttgtgtgttttaccaagcaggacagatggggccgtcacccccgtgacccgagccctgcaaaactgtgttctcacacgaaaacccccaggctctgcgggcagcgtggtcctgcagtggctaacactgggcgaccggagtcgtgttccgacccctaggagaggaaccggctcggtcgtggtgcagcccgcgaggagacgacctcagggcgtaatccgacgccgtgggttaagacatcagacctcaggcgcagtgcagccggcccctggggagtcaaggaccttgatcgccgataacaagttgccgttggcgggcgccgagggtgacccgcgagcgcggcacccgcctccccgcccctagcaggaccccctccgccccgcccccagccggacccctccccgaggccccgccccacccgcgagccgcagccgcggccccacagcttctggggctggggccccggcagccgggcaggccggcctgacctcgacctccgccgtgcgggcccgaccggtgagtccagcccggcagtcgcaggacccggccgccagcctctccctccacctctccctgcccccagcgccaggcgcgggctgcgctcggtggcggcggcggggccctcaggcggccatggcggcaggcgccggggccgggtccgcgccgcgctggctgagggcgctgagcgagccgctgagcgcggcgcagctgcggcgactggaggagcaccgctacagcgcggcgggcgtctcgctgctcgagccgccgctgcagctctactggacctggctgctccagtggatcccgctctggatggcccccaactccatcaccctgctggggctcgccgtcaacgtggtcaccacgctcgtgctcatctcctactgtcccacggccaccgaagaggtagggctggccgatcgcccgagccgggccccagatgcgctgcgggcgggtcgctggaggcgccgggggaagggcggacccacgcgcggctgagcctctcccgggccccggaggggcggactggccactgccccgggcggtgtccgccctgggccgcctggagactgtcacgccactatcccaatcccgtgaccatcccaagcctcccctgggcagcggaggggctgttaaggtcactgccccaggtcctatgtccgcgcagatcctccccacggccgcggacgggccggagggcgcctgcccagccgctatcccatgcggcgccaacctgtgagacggacccgcggtcgggtgccttgcacactggggactgaacacccccatctccgtcctgcctggcacagggacttgtgccaagcccgagacgccctttgaatactttcgtaaccgttcgtttctggaaggttgagctagtgatcttgaaatgaccggtagcactgatcaaagatgagttaagaggtaacttcctctttgcttcatcgactttttcaagaaaaacaaactggaatgttatcaaggcaataatttttttgtcatcacaacctagggattaaaaaaaccccaacattttattagcaataattacatttgacctttgtacaaaataaggagtaaatataggctttggatagctgttcatcagaagcaccctttgggctgagtgtggagggatagggggcagagtggagttcactcccatctatagtttatactacgtgggataaatattacattgcacattctgtgacattactttctattctctgctccaaatagtgaagtccctttataatcatttgagtgtaggccttgtggaggactcatggaggttgaggttggattaacagaaatacagtggwaatatttcatgccctccatgcatgcatccattttgttgttgtttttgagacaggggtttactctgtcacccaggctggagtgccgtgccgtggctcgatctcggctcactgcaacctccgccttcagggttcaagcgattcttctgcctcagccttmcaagtagctgggattacaggcgcgtgccaccacggccgactcacttttgtgtttttagtagatacarggtttcaccatgttggccaggctcatgcatcctttaaaaacaaaaatttgatcgagcctacattttaaaatatcttgtcaatggattggtatgcttattatgtatttcttttctttttttttttttttgagacagagtctcgctctgtcacccaggctggagggcaatgtggtgatctcrgctcactgcaacctctgcctcctgggttcaagcgattcccttgcctcagcctcctgaatagctgggactacacgtgcctgccaccacgcccggctaatttttgtatttttagtagagacggggtttcaccatattggccaggctggtctcgaactcctgacctcaagtgatccgcctgcctcggcctcccaaagtgctggtatttacaggagtgagccactgcrccaggcttattatayatttcttaatagacattcccattgtcatttgccattgctattcatttacatattacatatgaaaaagtaagctgctttagtttttggctgttttgctgcctgtttctagaatttaccagagggagtgtgttagaatgaaaggatagctgggttggaagtggaggtcttggtttctaactggctcttccaccacagacctgctgggtctgtgttcccacagataaaatagaaaataatgcctgccaaaacaacttgacaaggatgcagtgaggaccaaatratatatatgcagataaatgtaaaagattgcgatgtgcctaacaaattaaaaatatcactcaacacattaaaaatattactgttatcagacaacatcctgaaaacacataataaaatttagttttgattgggtccagatttagctaacagcatttgaatgtttctgatattggccagttaagttgtggactcttcaatgttattattaatttaagaagcatttgttgaacacttagaaagagcagggcttaccaaaaaagtcaagagcttctgcctagggaagtaaagggaggcctgatggaagaggtacgtttatgattaattagtttttaggatcagcctcatgtgaaaaaaaaaaaaaaagggtggagggtggggattggaggcatttaaaaataaagtgcaaaatcaaatggcccaagaagggtaaatgagagttaaaaacaagagtttctgaaatgtatgtcactagaaccttcatatgcttctgagtgactgatgcagggaggggaaacgccattacaggatccacattgcttgtttggtgaaagcccagcaacagtgtgaagagtgtagcagtttctggctattttctcttaagttcatagaactagcaaatgactggatcaggtaggattcagatctaagttggtatgacttcaaaaataaaaagatcctatgttttacataatacaaatatgtaaagtgctttcacatccatggttgcatttgtgtcttgttatcagccaaagaggttagcaagttttccgcttcctacaatggccctcctaccacctcagtatttcttctatccatctatcctgaagtaacagtagtatatgttttcataagaggaaattgaagcccagagatgtcaagtgactttcaactggcttgggacttgttttctgattctcagacttaagaattcttagtgtttttttcagacttgacagattgcttccagaaagagtcagcaaaaacacataaggtttttcgatttagatgcttgggcttatctactcatataggctttaatactgagtgcatgaataataacatttgatacgtttttaagcatgatgctaatttctagaacatgactggggataaagggaaactaatagaaaaaagttgtgatttatatttagcttctgcaaactgcttttcaagccatcatttccawtaaggaactttgtactccagccaaattgaacttcttactataacaaggatttctctccttcttatccctctcttttccccttcctcttcctttcttctgtaccagttatccaactatgtacccatctttcaatacccaattctaacactatatccttatgaaagttatcttccttttcmtaagtcaaatcaaccactctgaattcccatgataatgacaataactaacttttactggrtttttactgtgtatcagggatgattttaagtcacttttattctttcattgactcctctcaacaaccttatgaataaggtactattagtatcatcattttatagatgaggaaactgaaggaaaattaacctcttctagagtgacatacctttaagtgggggccaggattccaagccagaagctatgcttcctttgtagggctttgtagctctcctgtggatctttaccgttttattttggttgtctgtgtccttattgagcaggacaacttaccagattttaagttcagacagcaattgctcgttcatttgtataatctctatagcacagtgctttacatcaaacagatgcttataattttgcatcaaacagatgcaattatttagaaaacaaacatttgtttgttttctaaattattggctgyaggaatgaaataacacaatgtgatgtcaagagatgatgtttttcaacccttattcagttttagctgttcttgggttaaatacctagcaattgtttggccttggtagttttaagtagagtaagcaagtgttagggcaaatggagaaaacaagaactttgtctcctcactttgatgaagcagttctatctgaacatcaccctaagtaggtagtccctggcccccattccttggctacctaatcttaaaatagaatcacagattcttagagtttggaaggaccttagagattatttaatgtaactcctacatttatatatgtgataacccagtgatttgaatctagttcttctaactccagcctagtagcagtctctcctactaactccatgcacttgtgtttgactggtatawactgttactccattctctattacatatctgattaaatgtttctgccctgtcttcgtgatctgtgcatataaatccatgtcagtgtctttattaagaatatgtttatggcagggacaagtgcctagcttaaggtcaggtcaaagggcattaattaatgcatttcttgtgtttatgatgataaagagttgaactgaaaagtaagtatacctgagcatgccagaaacaccttaagaaatggtttattctctgtttaaataacttatttaaataactcatattttaaacacagaataaaccatttcttaaggttatctttgtactacatattgcctttgtattacatattatagagttattttggggggaataatagaaagaaaaggaaataacctttagattcctactcagacttttttttataggtttgatttctttgagatctagtatatttcctttttaagcactcttttactcccactttttttaaaccagctcagtaacttttcaagcatcatttattaaggcaggactcttgtaagggcgtgacctctctcattaaaacaaaatgtgaactccagatttccaggagatagaagcagggagggacttagggtgaggcaagccaggactcaaaatttaaggaggcctttgcaggactgtgagaatgaatgtctccttaacttctgcagccatggtgcctccctgcctcacccttagtccccggccatctagaaggagactcttcagataatgtggaggtagcttcccttgattcctatggcttcactatacttaattcctaacgaataaaactgtttctcctttcaaattctggttcaagtgtggataaaacgtggcatcgtggtatttagaagaagctttgaattttcctcctggtgcatttgattggggtagaaggctacaaccagaccacttgggttttgcgaagttgaagaacagaacagaagcaacccagtacagttgatgtggatgatagatttggcctcaggggaattctcttcacacccctctctctttttgttccccttagcacagtgacaggctggcattttcaacaagaaccctaataagtattaaagaagaaagaaaaccaaaatgattcacactgaatataaaaataaaggccagctttcaaagtacagatttatcaggtcatgagaaaaccccattggccctgaagtgctggtttaactgcatttatgtgcgatgtctgtctggtttcctttgccgcagcttataacctgcctaatttcctaaaaatggatgtgctcttctcaaatgctggttcctaaactgagccaagaccaaaggtctgggtcgaaagcagtgagcccctagggccttcctcattggcttggcagagagtggttttaccttttctgaccaccaaggctcctctggagcctccccaggcctcaggtgggaaccctccctccgtaaacaaagaagcaccctccccatcacaggctcccagtaaacaatgtcataagcacatcttaggcacttattgggttagagcagttgcaggaatggagcaatcagtcatttctacttcttatgtcttccagagtcaggttagcagtctattagaaactccataaattctcttttaaaaatcgtagaatctcttgtgatccctggaataatgaaatgaaaaaaaaaatcttaagagtcacctgtctgggtagaaagtctacctttaacagcatactcgcattacatgtttttcacatatgcacaatatgtcttctaatgtcctttcttcctatgtcttagaaatgcagtttctatttttatgaagaaagaagtcaatgtttggataattgaaatcttcttgttaccagctgacctaatggttattggttatctaattcccttctgcatagatgtcaattcatccaaggccatttcaagcaaagaggtttttttgttttgtttttgttttttttcagtataaaaatttacgtaatgaacattgtatagttctagtatttcctagtttgggaagattttttcttttatatattatctatacttgcttttatttactatttttctttatgtcaactttaaatcaactcttttaaaaacttagactcttactctgacttaatatttataaaatcatagatatgatatgctatttttcttttttttttttttgagatggagtttcgctcttgttgcccaggctggagtgcagtggtgcaaccttggctcactgctacctccgcctcctgggttcaagtgattctcctgcctcagcctcccaagcagctgggattacaggtgtgcaccaccatgcctggctaattttgtgtttttagtagagatggggtttcactatgttggtcaggctgggctcgaactcctgacctcgggtgatccacccacctcagcctcccaaagtgctgggattacaggcatgagccaccgcacctggccctgtttttcaaaatacattaaattttttcaaaatatattaaaataaacataaacattcaattgaaaagtttacctacagatcacctaaaattatctgatggagtatcagtaataacagtaacagtaacaaatactgagctccttccatatgcccagcacttttataaacattttacatgtgataagtcatttaattttcacaatgagagaggagcaatgattattaccattttcaaatggagagactaaggcactgtaaagtgattcatccaactcatttagccagtaagtagcagagcaaatgtgggtgcaagtagagtctagagtctatgcccctaaccactctgcaagaaaaacctggggcatgtattcttcccattgcttttttgttttgtttgtttgtttgtttgtttttgagatagggtctcacttggctcactgcaaccttggcctactgtcctcaagtgatcctcccccctcagcctcccaagtagctgggattacaggcatgcacccccacgcccggctaatttttgtatttttagtagagacggggtttcactatgttggccaggctggtcttgaactcctggcctcaagtgatctgcccgcctcagccttccaaagtggtgagctaccacacccagcctgattttcatcatctacgtatttagctcctacagaagatttttaaaaatagaatacgtggctgggtgcggtgactcatgcctgtaatcccaggactttgggaggcctaggtgggtggatctcaaggtcaggagtttgagaccagcctgaccaacatggtgaaaccccatctctactaaaaatacaaaaactagccaggtgtggtggtgcacatctgtaatcccagctactcaggaggctgaggcaggagaatcacttgaacctgggaggcggaggttgcagtgagcgaagattacaccactgcactccagcctgggcgacagagtgagactctgtctcaagaaaaaaaaaaaagaaagaaaaatagaatacgtgtctcatgcccatgagaggatcacattctaatatgaaagatagggccacatacaaatgacatcacatcgatctagagctgaaacatacctcagaaactatctagtctaccattttcatttagagaagacctaagaacatgttccagaaaaatcagtattttgaggctgtaagtgaaatttgtccagtgagttcagtggatctcagcatgcagctttcacctgatgccagtgccatgctcttgggcttcccaggctccagaaccatgagccaaataagtcttttctttataaattacccagtgtctagtattctgttatagcaacagaaaatggaattacacaactcttatttgaaaaaatgggaggctataattatgaaacaattaatgacttatgtggaattacttcccttggttaaattagatctttactttcattaactaaagatgataatttcaaagctttgctttttaaatttgttctgctacctgtgaaatcatttaaaatcaaggaaactagacaacagaaacagtgcattgttataaagtcatgaacatcattgtcatgtagttccttatatttgtatacctgaggtactaaccatctaatgagcatattttgtacaacagaaggcctatatatttgcaaagactgctttaaccctgaaaaatatttgtagaaggtgtatttttaagggagtaggtaggaatggaatgactggagataggtaggtttgtgtcctttgatttctccctagatgaagttgtaggtggagtaagaggtgtatcaggcagtccttgaaggagggggcatatgagtgctttgctgaattgggtgagaagagtgtttagaaaggaaaaagccatgagacagtattaagtcataaataaacaagaggactttgtgggtggaatggagctggagtatgaaggtgggtgattgagagttatgctgcaaagagactcttatcagtgagtaaagagcttgtggtaagattagtttaggagtggccagaagagctgttcctaaactcatgtgctccttggtgtgctcctaaactaagcccatgaaggctctcccctaaatctcctgtaatacaaatagaaaattatttttgcacaaacacctttattgtcacacttggtccattaattgagggatattggttaaacatatactgtgtgccagagtaatgttctagagtactgggaatgtaggggtgagtgagaaagacacaatccttgccctctctgtgctttaatcagttcagccttagaaaatgaaatatttaaggtgagaaggcaaggaaaagggaagacttaattttggagttttggattgggtatgtggggggcaggtggctttgattagggagaccaagatgaaggtactagtgctgtttctcagtgagttacagggttgtgggcaaggaagaagagaagtagatgcctcctctctcacctcaatctttctccttcagtcactgcgtagttccgtctcttaatatggaaacgttaagattcttatacttatgggcctttttccagagaatgcagagagcatacaggattttgtcagaggtgcagttcacctctggatgttttctggaagagtaaatcatgtgtgaaaattgaataaattaatggactatcagacttgctgtttgcttttttccagtataagctttgtgtctttgagactatggtaggagtgtatgacttcctggctaggatgtcagtttaatttgtttgtgcttctatacgatagttacagtgttgtcagaaagcattgaggaagttttaaaatcataatttagttttatctaatcctgtaatgaatagaatcctatgaataattcaaataactagaaaagctaaaatttcccaaatatgtattttatacagctctttttcagtgtataattgaaaaacaatttaaattttaatcagtgggtttttttttaatgacaagsggttatgattgatttttagtagttattttgttttctagaataaatttatatgaaatttaatatatcaagtaaaattcattgttagggaagctattacttaaattatgatatagccacataattgaataccatgcagtcattaaaaagaatgatgtggatctctgtgtttgacctggaaagagttctgtaacattgttaaatttggatacagtagatattatgaaaactatataattaaaaacgtatttattcatttatttaattatttagagacagggtctcactctgttgccccagctggagtgcagtggctcacttcaacctctgcctcctgggttcaagcaattctcgtgcctcagcctcctgagtagctgggattacaggagtatgccaccacagctggctaatttttggatttttaatagagacagatttttaccatgctggccaggcttgtctcaaactactgacctcaagtgatcagcccaccttggcttcccaaagtgctgggattacaggtgtgaaccaccacatccagccataaaaactttaaatgttagaatggaatattacctagagaagttctactacttggaatagatctcttctaacaaacattgcttatggctttataattcataatccaagggtggctttttcatccttacatttaacttttttgaaaataagttaacatgaaaactagaattgagttagggaggctctgtagctcccgtttccatgaagagtctcttctggctaggcacggtggcactcgcctataatcccagcattttgggaggctgaggcagaaggatagtttgaggccaggagtttgagaccagcctgggtagcatagccagatgctgtctctacaaaaaatttaaaaaattaaccaggcatggtggtgcacacctgtagtgtcctagctactgaggaggctgaggtgggaggattgcatgaacccaggagtctgaggttacaacatgtgcctctgcactccagcctgggcaacagagtgagacctgtgtcaaaaaaaaaaaaaaaaaaaaaagtctaatctataattgtaccatttttggaaagggatacctggaaggaagttgttctgctgtgcctggccaaataaatcccagcctgtttgcagggataacaagttagaaaaaaagtgagaaaatgcaacctatttaatcgctttcacctaggaatggaggtggtgaccaaaggaaaaagagaagataggtctggctcctgaggccttgggaagactgggaaaacttggaaggatttgggaagaattggaaaaggagtgaaccaaatattggcagatcattgtgcctttctgggtttaaaggaaagactcttgtggctggcaccatttcctgtggctcactgctacttgaaagtgtattgtgtgagggggaaagtgcttatcagcaggtttgatggaatagggagtttgtgaagatttcaggtgaaaagttccattcagtctgtgtggcctgtggtaggataaatctcatcgaagggcaagtcggaagacccgatctagttcctggacccagcctaagtgcttgccttgatgtaaattatcactcctccgtatgtttcactttcatctttaataaaaagaatatgataataactgccctatctctgtggatttctgtattaattgaaataatacattagaaatgctgtttatcagctgggtgtggtggctcacgcctgtaatcccagcactttgggaggctgaggcaggtggatcatttaaggtcaggagttggagaccggcctgggcaacatggcaaaaccctgtctctaccaaaaatacaaaaatttagctgggtgtggtggcgtgcgcctgtaatctcagctactttgggaggttgagggggaggatcacttgggcctgggaggcggatgttgcagtgagccaagatcctttactgcactccagcctgggcgacagagcgagaccctgtctcaagaacaaaaaaaggaaagaaaagaagtgccctttgttgtactgttgaagatcacattacctttgcaatattatctcttgtaaattacctgttccaggaacatggatctagtcactgactccagtaaacctttcactttcagtcagaaactttggtttctgcctagacttcctctcttctctgtttacattcccagtctctccctatttaaacgcctctagtatcctaatgaagcacttttaaactggtgaacagtcttcatttcccttttctaaattaagagcgggatataatttggggtagagtcaccaccagttgtggtgtaagggttaatcaaatttatttcagtatgaatttctgttaatacctgaccatgagacctgcctgtagctagtttctcagatcagaggtcagaattaagctttcaatgttgacttttagagttctccttgagaagatccagattttcagtataaagagttacatagagaaatggaagatccctctgacattttgtcattacagaaattttaataacttcaatgtccaattttacatatgtttgacgtgtaactttgctttccttcaatcatcaaaattaaaaacaatttttcatagtagaaaaaatgggtaagaatttgctagtttgatatggtcaactaatttttgataagggccccaagaggacacaatggggaaaggatagtctcttcaataaataatgctgggaaaatgatttccataggccaaaagaatgaaattggaccttatattacactgtatacaaaaataaactcaaaatggataaaatacctaaatataagaacaaaaactgtaaaactatacccaaaggaaatgaaatcatcgccgtaaaaagatacttgcactcccatgatcattgtagcattattcacaatagccaaaatacagaaacagcctaagtgtctgttaacatatgaatggataaagaaactgtagtatgcacaatggaatattactgagccctaaagaacaaaatcttgccatttaccacaacatggatgagcctgggagacattatgctaagtgaaataagccagacacagaaagagaaatatggtatgatcttgatctcgcgtatacacagaatctgaaaaaaaaattcagagatagagaatgaaactggttatcaggagcagaggggcataaaggggaggaaatgggaagaggcaggtcaaaggatacattacagctttgcaagatgagcaggtctagagatcttatgtacaacctgaggggtataggttaaaaaaattgaactgtaaaatgaatagattttagctgctcttgccacaaaaacaaaaaaatgggtaactatgtgagatgatggatatgttaatttgcttcagtttagtaccgtttccatctatctacatatcccataacatcatgttgtatacataataaaatttatctttaaaaaagaatttactagtttgaaaagaatttactaggttaacagaattgttctctgtaagacactttgggattctttcaaaagattctgggtgggatgtgttgtttttcatttttgtactgtcgtgatgactgcttagttttgtttgccctttcttaaattgtttcacagtttccaagataaacttttaagaacgtgctcactggaactgaatatgatattttatttattttatttttcaagacagggtctcgctctgtcacccaggctggagtacagtggcactcactgctcactgcaccctcgacttccccaggcttgggtgatcctcccacctcagcctcctgagtagctgggactacaagtgtacaccgccgcaccaggctaatttttatatcttttgtagagatggggttcaccatgttgcccaggctggtcttgaacccctgggcttaagcaatctgcccaccttggcctcccaaagtgctaggattataggtgtgagccgccgaacctggactgtgattttctgcttactactagttttcattgatttaattacgatgtgccttgatgggtgtttaaaaaatatttattctgtttggggtttgttgagcttcttggacatgtaggtttatagatttcatcaactttggacatttttcatcatttatttcttcttatatttttcgtgccccatccgctcttttctctttctaagactctagttacatatgtgctagactgctttctgttgtcccaccactcgccgatgcacagttcaattatttttagtcgtttttctttcgtcattttggatagtttccattggtacatgcttattgatcttttcttctgtggtgtttaatatgctgttaatctcacccagtttattttacaattcaaatattgtaattttcatttctggagatttcacttgagtcttttcttccatttctgtttataattttcctgttttcctctactttcttgaacatgtggagcatatttataataactattttgatatcctcatctgctaattctattacttctgttcatattgattctgattgtattctgattatatggattttacttctagttgtcaattatattctcctgcttctttgcatgactggtaattttttactgaatgccaaaccttgtgaattttacctttgggatactagatttttttcccctaagatgtactttatgatggctgtagttaagttgccaggaattacttggatccttttgaggctggattttaagttttgttagggctgtccagagaagccttcagtctagggttaatttatgcctgctggtaaggcagtacacttctgagaactttacccaatgccccaagtattaatgaggctttctgctttgcctggtgggaacatgaatgtcccagccatgtatgagctttgagaattgtctgaccttcaacattgcagtgcttctctccctggcctttgttagtttcatctcattcaggcacagatgagttctcagccgaagacggaaagatacccttccgtaagacgtccacaacttatgctcctctctctgtgcagctctgtcctctcaggcactctgcctcacaaatcctaattgccttgaccttcctgaactttgtgtttctcttaaacacagcatgattgctggactctgttctggtcatgggacctgcactgtggcctggaaactgactctgggaagttagctggagcagtcgcagggctcatctcatttgtttcccttctgtgagggatcacaagcctgcactgcctgtaatgtttgaaaactgttttttgttttttgtttttttaaaaatatattttattgcctttctagttatataaggtgggagagcaaatctagtccctgatactccattgtgaatggaagcagaggttggcagttggcccctaaggtcttttttcacagcaaaaatttaactgagtaatttcaaatctgtggcataatgcatagtattatattaaaagagccatggatgtaagaatcaagatcaggatcctaatccttactcagttgtttaactttgtgtttcttacattgtggacttctgtgaccctctacctagatgacttaaagcagttaatttgatttctcaatttaattcgcatctgtagaatgagggttagaaatgttctttataacacacggggtgctacaaagtgtgaagccttaggttgagctattttcagaaagcttattatcacttaacaatctttattttatttacattttttataggcaccatactggacataccttttatgtgcactgggactttttatttaccagtcactggatgctattgatgggaaacaagccagaagaacaaactcttgttcccctttaggggagctctttgaccatggctgtgactctctttccacaggtaaattagtggagttttttatttttttatgataccttaaaaataaaatgaactgagctgtttggtcagttttttggatggatatacatttgggagcaaatgtatggagttgtttaaaaagtatgtcaagaattcattttgataagtgtactttattttaatgccatgattatttccttagagctctgtatttctaaacagcatagggcaattatttcataaattatttttaattcttaatgattcttaaactttgtttctttcagtatttatggcagtgggagcrtcaattgccgctcgcttaggaacttatcctgactggtttttttyctgctcttttattgggatgtttgtgttttattgcgctcattggcagacttatgtttcaggcatgttgagatttggaaagtaagtatgctttttaagttgtacattaaaaaatataattgaattcatttgcacaatctgttatgtcattcatcgataataaggagaacaaatcttcaatcagtaacttaaattaattcgtcggagtactcataaatgctacaccttaagtcttttaggtactctgcatgttataaatagttacattatttgataataattttatttttcttctcctcttctccaacttaatcattagcccaagtttmcaatagagaggattaaaagaaaattaagggacctgaataatatagaaaagggatatgcagtacttaaataagcatttgattcatataataaaataatgcagtgtggagtctaaggtccttttttggtcgaatcttcatgtgcacagaaaggggacccgccttgacaacagtcaccagcatcaggtaattgtgagactctcaactgtggtaggcaattggtgagataatgtaaaagcaccttgtaaatgctagtgctaaacattagatagtattatctgcctctgttgcctctttcttagagaccaggaaatagtgcacaaagcaggaatactattctctgttcctctttttcatatagttccctctcggtctgatccttttaagaactttgtcatttgctcattttggctttggcttcccatgcctactgattctttttagccccactttattgctgaaaaggagaaacagtagctctgaaaaaactctctaatgataaatgataggagaagcttaaaactatggatcatttagcagagggcaggcttcaggcagttgattctcaattatggaataattgtatttaccacctatcgagcacttacatgtttcaggcattgtactaagagcttcacaggcattatcttatttattccttacatttatcccgtaaggtgggtattacctccatctaaagacattggggcatccaggcagagatgtaaagtatgtagacagatataaaaatctacagctcaggaaaaaatgtagattggagataaggatttagaagtcattagcatatagatggtagttttaagtatagataaaattgttcatagactataagaattccagatggaattctgaaagcatcatttaagatatgaatgaagaggcagtctaggaaggagcgtgagaagagctccagcaaggtaggaaaatcaggagagaacatggaatagataaaaacacagcagagcttttcaagaaagagggtatgatcagcatcttaaatattgtaaagaagttatgcaagataattaatgaaatgtatcccttagatttgtatcctttaattggaattgaaaattgaaggtcaatttaccttaaacaattttagtagaataatggggccaaaagccagactagagtgtgttaagcaacaaacgtgaagagaggagaaaattacaaatgttgactaattttcagtgagcctatycgtggagcataggagagagagtgacagcttcaggggaatgcagactagagggactgatgctgattggttagtggttttttgagaaatttaagcatatttactaggggaaaaatgtctatggaaactaaaaaaactacagtgactattagtacctcaataaagaagactattggaattttccctgctttttaagtgaaattgacctgggagtrtttaaatttgccttaaatcatatggttgtttttattataatttttccttatgtacacaagtagtgggtaattattgtgaaaaaacttcagactttacaggagttcataaattagaaaataaaagtctttataacatcagtgataactattagcaatttgatatatggtatatatttttttccctctgcatataccgttacctatgtgtgagcacatgttgttctgtaacytttttaacttaacagtgtagtcaactgataattcaataatggaagtaaaggtaaaaataaactaagcctacagagatttttacatctttgctatttaatatgtgatgaacctccatattcaggaattttatttacaaacaccttatctattctttgtccttcctctttagagtggatgtaactgaaattcagatagctttagtgattgtctttgtgttgtctgcatttggaggagcaacaatgtgggactatacggtaaatctgaatatttaaatttrtatttaagtacttttcaaatatttaggaaaaagtattgcattgttaattttcttcaaaaatccttggcattgtatttaattttttttttttaattggtgtatttaatatttgttccatttcttaacatttttttcttcattttataatgtgtattatcctatataccttatggcatttcctcctatgcttgagtatattgccacatagaagaagacaacctcatttccctaatactaaataaaacaaaaacaacaacaaaaaacacacattggaataactttttccagggtgaaataaaataaatattttaaaaataaatccagtaaaatgttttacatttaaaacttgtcactcaatattaggaaagtagttaatttgcatttttataatctactttgaggtgaagattcccatattaaggaatgtttttattttctgcctgcttggtgacctcagtagtttcataaaagttggctcttaggaggccactgtcataaattcaagcttttttgcaaaagaagaacatttctgaagaaacagttgtcctgttaccacaacstaagtccaccatactggctaactgactcacactttctgctcatagtgttaagaataataataataaggatatcaatagtcaacaactaacagtcattcaatacttatgttcctaaacattcaccatctgcccctcagttttatctgcccctcagaacaatcctataaaatagatattattagtattatgctttataaataagtcttagggtgattaagtaatttgtccaaggacacatgagaagtgctggagctagraattaaacagactgattccagactgtatgtaatcactaagctatatatctagtaaaaatagtaagtgatacaaaactaaacatagttttgtggtaaacatgatcagcagtcacactccttgttatttacctaaatgatttgaaaacttatgtccacacaaaaacctgtacacaaatgtttacagcagctttattcataattgccaaaatttgaaagcaactaagatgtccttcatcttagctggataaactaatgctaaaaagaaatgagctatcaagccatgaaaagaagttatgcgaggaacttatggagttccaagaagttatggaggaaccttaaatgtttgttactaagagaaagaagccaatctgaaaagtctgcatattgtgtgattccaactatatgacattctttaaaaaggcaaaattatggagacagtaaaaggatcagaagttaccatgggttggaggaagaagggatgaataggtgaagcacagagaatttttagggcagtaaaactattttgtatgatactaaatggtggctacatgtcattatacattcgtcatagcacacagaatgtgtaacaccaagattgaactctaatgtaaactatgaactttgggtgataatgacgtgtcaatgtaggttcaccagttgtaacaaacgtaccacgctggtgtaggatgttgttggcagagggaggggtggctatatacttttccactcaaattttgttgcaaacctaaaaccactctaaaaaattaagtccattaaaaacacagtatgaggccaggagttcaagaccagcctgggtaacttagcaagaccttgcctctacaaaaattctgtaaaactttwgccaggcatggtggcatgcacctgtagtcccagctactcaggaggctgaggcaggagggtcaactgaacccaggagttcaaggctgcaatgagccattatcatgccactgactacactcctgcctgagtgacacagcaagaccccatctttaaaaaaaaaaaaaaaaaagatttccctgtagcatttagtatcagaattgccaattatcatttgtcagtaggctccgaaatagactttgggcatgtttttaagtagtagtgatagattcttcaatacattcatattccctctcatcatgtaagagtaaatagaatcaaggatatgctactataggcccatacaagataacagagggatgctatgcgttttttgtagtaactgttcaggttgtgcccgtaagaaggtaaatgtacgggcagatcacctgaggtcaagagttaaagaccagcctggccaacatggcaaaaccctgtctctgctaaaaatacacaaattagccgggtgtggtgatgggcacctgtaatcccagctactcgggaggctgaggcaggagaatcacttgaacctgggaggcagaggttgcagtgagccaagattgggccactgcactccagccctgggcgacaagagactcgtctcaagaaaaaaaaaaaaaaaaaaaaagaaggtaaatgtagacctagaagcagttagacaactctagttattaagtcaggtgtggttgtcttaaatttggaattgaatcttaaaattgtttcactcaatgttttggcaatatcgtaggaagaaaacatacctgcttattcttaccaacaagaatgcttacttttgattcaggttttctaaatttaattattaacctgtagtttccacaaattttggtacattatttcagtctattttctaaacatagtagcctctagcttctggcaattcattgttactgttttttaaatcctttgctgcctttggaagttttcttgaacagcagttgaccaacaggtaaatatattgctagagatttaatcctggatattaactacacagatgttttgcttgcatacacatcatgatatttgttacatttatgatgcaaatcatggtgtctccctttcctgtgatgctactttttagaagctactaaattcaaatgaactatcctttttcatgtttaagtcagatgaaatcttatgagattaaacatttagtcatagttatataaacagactaagctggtttggtggattcatctttcacttatgaagaaagcagtttcaaaaaaaagtcactttaggctggtccaatggtagtcagttatctcaattgattgctcacagtcagttacaggtcaaactccttgttcttctcttttcccccctcactactgtacttggctagtctacaaaaaataataaaaatttaaaaactaaaaaaaaaagttaaaaaaaagtttttaagttatcactttggattatattccagaagttaaggtttgatcacaagaaaaaggatagcttattgtacagggcttatcattatgtttctttattatttaataaaaaaccaaaattctgttgtcttaattgtttctttcttctacccctaaagattcctattctagaaataaaattgaagatccttccagttcttggatttctaggtggagtaatattttcctgttcaaattatttccatgttatcctccatggtggtgttggcaagaatggatccactatagcagtaaggcaataatttcatcattcagtgtcaattttatgatacattttcttatcaccagttataaaaagattaaaatatgccaaagttcaagaatggggaaggaaactaagtatcttaaagaattcattttaggcacatagtacaaaagcattttaaaaacagtttaaactgatattttcctctttctacaagcttgctctgcatagacttttctgacatctagtttcattactgcacataattaagagttgccatttgttttcctgcattttgtgccttgaactaatagcagagaggagaaagggtagggaatgtatgagttcctgattgaaagcaggaaagtggccagaggtcaatggtttcacatatggggggatttattactcatcaagtaaattttattgaaatttcactgaaatatatttaaaagaactattctaatatttcaaaaggtaaaattttaactttaattcttaagtgggtatactttgtgcttgtgttctttacaccttgctcatgcaagtattaaatataatgcttttgtattttttcacatttgttttttaaaacttcagtacttttaagtgggcaagagttgggattcctgcaaactttttaaacaaatataacacctatgtttttaaaaagcctattgtcattttcaaggtagttgaacagaagaagacaagtacttattccagtgataccatcttataccaaaccattgttataatgcctttttcagggccgggcacagtggctcatgcttgtaatcctagcaattttggaggccgaggcaggtggatcacttgaggtcaagagttcgagaccagcctggccaacatggtgaaaccctgtcgctaccaaaaatacaaaaaaattagctgggcatggtggccatgcttttgtaaatccagctagctacttgggaggctgaggcaggacaattgcttgaaccaggaggcggcggttgcagtaagctgagacggtgccactgcactccagcctgggtgacagagcgagactctgtttcaaaaaaaaaaagaatgcctttttaggattgctttaaactatagcatattcactttaatttcttttgttgtatagttcaaaatttctatcctttaaagtcatttggagcaaggtctaataagatattaaacattagatatagcatttttagtaaaaaaaagtctcattcttttaaaagacgtgtaagtagactttcgagacaatttcaaagggatcctcataattgacaaattgtcaatatttatgaatacactttatatacataattcaaaagcaaagtatacaattcatctagaaatataagttctgatatatttggaaaagttgtcattttttgaggtgttttgtcagttgatctcagtatagtactgtgcttaggaatacatgttgcttgactgtggatgataacatagaacaatagttggaacgttaagttccattgaagaaaacaagatgtagtaatgatcattgtctactctaaagaatatttttgaccagatgcggtggctcacgcttgtaatcccagcactttgggaggccgaggcgggcagatcattaggtcaggagttcaagaccagtctggccaacacaatgaaaccctgtctctactaaaaatacaaaaattagctgggcttagtggcgggcacctgtaatcccagctactcaggaggctgaggcaggaaaatcgattgaacctgggaggcggaggttgcagtaaggcaagatcatgccactgcacttaagcctgggtgacagagctagattccatctcaaaaaaaaaaaagaatattttcattaaaaaaactgttagatgtttgaaggatgacttaaacacaagttaggaagtggttggtttcaaactcttaaactggtatttttccaacttttttaggagcagattttttttcttgaatgagatttaagaatcataatataaagcactattagatttttataatttattactatacagtgtcatgtatataattttataatatggtattactgtaattttatagtaagttctaacttaaaacatgtaaacttaataaacaagagtaaagctgttcttgtgaacccatttaaattggttatagatttaataacctcaataccaaatttatttcaatattttatttaggataagcagtgccgagaggatactaattcacatagataaaaatgtaatggtctggattttacaattttacataaaagaacatttgcagtctgaatgcaaaaagaaaggaggtggggatgttggtgtagaaagaaactaggataagctgggtgtggtggctctckcctgtaatcccagcactttgagaagctgaggctgggaggatcgcttgagcccgggagtttgagactggcctgggcaacatggggaaaccctgtctctactaaaaacmcaaaaaattaaaaaaaaaaaaaaaaaaagaaaataggaaaaaagaaggaaacctgaatagaactaaactattcttactcttcttcatcagtgatattttgtagaattggcagaataagctctatttcagtatctccacaaaattatgttaatttggcaatccacatgtggactgccttcratgtagtaaaagttgatatagaataaactgcattaatttttagccagtttaaaacgtgtgtgaatatcaaactggaatcagacatctgtggcactgtattatgtctctgtcaccctcaggttctatgaaaccttgraaagcacaactcaggtttgtatactcctgtaggccatacactacatcacactgttctttaggcctcttgcacaaaatagatggtcagaaaatgtctacattgtaataaatgcagtgttaaaatgtgatactgattttctgctttatcccttagggcaccagtgtcttgtcacctggactccacataggactaattattatactggcaataatgatctataaaaagtcagcaactgatgtgtttgaaaagcatccttgtctttatatcctaatgtttggatgtgtctttgctaaagtctcacaaaaattagtggtaagaaatttttattattcatgatataaataatatacttagtcrtcaaacacaaagctggaaattatttcataaaatgtataggttttcttttgtagtgtaaaatcataataattagctatttgtgctccaagcaaaactgtgataagagttatattcagttaaattgtttagctgtagttatcatttacaactttctgatatcaagaaatttaaacactggaaactttaataagctacccagttgtgaatttgagaaggtgtagaaaagtattcttaaatgtgagattaaatggtctgttttaatactgaattaaagttataattaattctgtcgtaaaagctaacacatttaaaacttaatagtaaaattattttgtttaatttttttataggtagctcacatgaccaaaagtgaactatatcttcaagacactgtctttttggggccaggtcttttgtttttagaccagtactttaataaytttatagacgaatatgttgttctatggatggcaatggtaagtatttttctccattttatttattttttaacaatgcttaagagctatttcagtgagctatcagtagcctcaagatctagtctaggccaggcgtggtgactcacgcctgtaatcccagcactttgggaggccaaggtggacggatcatttgaggtcaagagtttgagaccaacctggccaacatggtaaaactctgtctgtaccaaaaaatacaaaaaattagccaggcgtggtggtgcatccctgtaatcccagctactcaggaggctgaggcaggcaaatcacttgaacctgggaggcagaggttgcggtgagccgagatcatgccactgcactccagcctgggtgacacagcgagactgtgtctcaaaaaaaaaaaaaaaagatctagtctatacaatatatacaataaatgtttctgagtatttaaaattacttcttctaagctgtgaataatattatattgtgtgtagaaatggccacatatctataggccaggtttccaacaacctggattcttggaaacacaactgtgtacctaaaaatagctatatttttctcccccaaaataccagtacaaagatgccaaaaaccactttactctgcccaaagactttattcccagtttacagcaagtaacaggaaaattagatggggttagtactagcaaaggtgggcactttattgcatcgagaattgtcagctaatattgaggaaacaaaacagaatagacagtgctactaaatacaggattctcagaccattttatgctagatgtaaggaaccctttttatgtgtatggcccttgaggatagtgtataatttgtattaatgatgactcagtcatcaattaaattaaattcgctttgattatatcctgcttaaggaaacgacgtggatgacataatttctattcaaaatgattataaaatacagaatatagtgcttgagagagacacgttagccatctaaggaaaagaaaatcaatatyggtaacacttcaattacaaagttggataaatggagcattattacattttttttctattgagacatatctttatggttggtctccaattaatggtggctttgaatagttttcttgtatttctatctctggacccactggttgtcaccaaattcatagtgatatataaatataccgaagtacaccaaaacaaaaccccccaaaaccctgcagtgaatcttttgataattcaaataatctcaccgtatttgttagakttggatatttaaaaaaatctgtatctattctgtgcatggattacaggagtacatctaatggtcccttactaggttgtgtagtatgctttttctggagtaacttaataacgtaatattcattcatagtccattcagaagtcktcattcttcctatggtggcagtgagatatacttaattctttgaggtggacaatgaacgttttcaggcaaaattaaaaaaaaaaatgtttaaaaatcagaataatgtcctttaatttggtatccactataaatatttttagggctcccaaacaatccagtttaaaaaataggggataattaatcaaaatatctaaaaactcaatgtaagttttcttttagtgaacttaggtatgtattaccaagtggaattgctgaattaaaataccaggtgttaaaaaaatcaatcatctgtcgtaacgagtaattggcctggtttacacctgtgatggagactggtaaactgaggaagtcaaattcaatttttatttaaaacactatgtggatgacaaaaamaaaaaaaaaaagccacacacacaatgtggtacttttcaagtaagcttttaacataaatgatagagattttcccctcatgggtgagaattccctctccaagggcagagctatgagtctcctttttctcctgggtttcattttctgaagagaagcatttgactgtagactctgggcaaagtttctaaatagaggccatctttaaatttgtaaacacaattctgtatatgcttcaagtatggtatcttttctagaccttttaccttcttacaactaacctcaaagaaacagaaatgtatatgatggaattaattcattataagatgactgataacttcttctagaaggaaatttgcagcttcgtggcacagcaggaagttgaaacaatgtggagtcaggagagttgggttctgttactttctagtttctgtattttagtcgtcttttttacctctgagcctcagtgtctataactgtgaaataacctgcattttccagaggactwcagtgaggtccaaatttgaaatgtattaaagtgctttaaaatgtagtatttttggtgaagaattttagrttaaggtttgatatttgggggagaaacagaatagtgctacttgagaaaagatagatcataatcgattttatattttcttttttgcttctaaaggtgatttcttcatttgatatggtgatatactttagtgctttgtgcctgcaaatttcaagacaccttcatctaaatatattcaagactgcatgtcatcaagcacctgaacaggttcacaagcatattgactgactaatagcccaaggaaaagaggagatgaagttaggggaatctatgagtgaaggaaatccccctgtgcaggaggctagtataccatcaataaggttatatttgaatataaaacataaaccctgtagatttcattgtgtcttatttcagttatgaagcccccrttgtatcatcattttttatcacagatgttctcagaattgtctacatattaattagaaacaagactaaagaaatgtcaatcctgaggacaacagtgaacccctgtaattctaagtagcagtttgtctctgagacttatcagacacagggttttcactgccaaaggattacataaatattcagaacataaaggattttagccatcttgagggtgcttactttgactgctaaaaactgaaaagtgattcaatactgcttaagtgcatggcttataatgtaattattgaatcaagttatgttctaagaaattttttatactaatcatttttcaagaggcatattagtatgttataaaatacttgcttttagtatactagaatttaaaagggctacaggaattttttaaataaaatttgtatttaataaaaggaatttgttgtaccagttcagaaaaacatacgaatctttatactgaaggtaacttgttccttgatattttgagttaaaatttcactgtcactgaaaagtggatgttaaatattccctttcatgaaaaatgaaaacagtagctaagagtcagttgacatgtaagaaaattagtaacttagaaaaacttacttggtaaaaaaaatcttccttttagaatacaaaagtttactttaagtacacactgactcatttgaggtgataagggataaaataagtaaaagttattcaaccactaagtacattaggtactgatacttatctttccactctaattgaaatgtatttagattactcattatgaatactactagaactatcacaaagatctctggggatccaaatcttcagattcccatctgaccctatttatttttaattttatataatagttcaacagaccatatgtcatatgatgaagtaatcaaaaaaaaaaaaaaggagtaatttgtgtactacatctgttttaggcaagaaaaaggtatattgaagaaaacagtgaaagatgatattccttaaaagcaaaaaaacatacttatgggaattaagtacacagaaaacactggagtacttattttgcctctaactaactattggtaaaacttcccaaataaggactttcttacaaggatgaatagtacttatgatttatattctaataatatatactttggcttaaaaggaaaatcctttacaaagttcaaaaatttaggaaataatgtcaaatattcgttaatggtggaagactaatttcttcctgtacaagtaggttgtcacaattagaaaaagtttatctgtaggcacctgtttttttaaaacttggaaaaccttattataactaagataagggtgagttatacaggcaaaaattagaatttaaaacatagaaaagcaggaggccaggcatggtggctcacacctgtaatcccagcactttgggaggccgaggcgggcagatcatttgaagtcaggagttcgagaccagcctggccaacatggcgaaaccccgtctctactaaaaatacaaaaataagctgggcgtggtggcaagtgcctgtagtcccagctacttgggaagctgaggcaggaaaatcgcttgaacctgggaggcggaggttgcagtgagctgagattactccactgcactccagctggggtgacagagtgagactccatctcaaaaaataaataaacgcagatgtgatatatataaaccataagaaattaggtatgttaatgatgtgctcttaatttaattgcagaccaagcccaatgaagtgacattatgtctttgtggcaatgacatattcacaaatccatgtcttaaaactgttatttatatattgttctattgctagtgatttaatgttcagaggttaatgattttagcaatttattccagaacacaaatttaaatgcatcttattgtcattagaatcggttgtacaacttaagtatatagaaaaggatgtacatgtaaaatagattttgtattccgttttttccttaaagaacataaccttctatacttggttttctaccttttgggattgatagagatacaatgaagccaaacctaaaattaaatcgtctttatttaattgacagtgttagagagaaaaattcactatcattactaaagagctgaaagcttaatacatattctttaggaatagttgctaactaactcataactatttagatttgacttaacagaaagggaggtcttacaatgaaacaggtttatgattaaagatgttacaattaaactattctaaagacttacaatatgcttcttagctaacgttataattgtatcatattacttaggttcaagttctttcttcaaagagtcatcagaataacatggattgaagagacttccgaacacttgctatctcttgctgctgctgtttcatggaaggagatattaaacatttgtttaatttttatttaagtgttatacctatttcagcaaataaaatatttcattgcttatattaatccttattttttcaatttcaatatgatcacttacagtttccatcataatttttttttgcaacatagccatttcttttttaaattcattttgtgcaccagtaagtagattatcatgattcttctccaactcttccatactctaaaaacacaaaagacaagttaagttacaaaggaccacttttcatctcaggttctaaacttgtacaattaattttcaaaagtagtaatttttgaatattcaaatgctcatctatttgaaataaaaatattctaagtaatacatgaataccaaaatacctactaaaaaagaaaaaatataagacatgaataaaatgttataggaagtacaatgtagtatactttgcccacaatgggtttcctgaactgttaaggtcaagataaaaaagactggaagtcccacatcagtaaaaaccatttctattaagctttccaaatatcaagcaataatctacttatgactaatagtgtgccatgaattcactagagggaataaaataatctatagtacaacctctttcacattatgaaaaataaaaattatgtcttacgtctttattattcattcaacaaacagttaatctggtgcctactatgtaaaaggtgtgtattaagtgctgtagagaaattaaaaaacaataatacatgattgcttcctgatggcaatgagaaaaaaacataggaacaaaacaaaaattttataataggaatggaagcacaacttgctgtggtgatatagtggaaaatggggattaattccaatttagtgggcaaaatactaagatttcaatagataaagaaaaaggagttaaatatattctaggggaagggcataagcagaagcatggaagtacatagtgagctgagagaaagcagttatgtggaggggtggggtaatgaacaaatgtagtaaatgaagcttaaaaagagggtcatgtcatagggggatcttcaatacctaagaatttagaacaggaggctactgacagtttttcaagagggaagagatatatttttaaaagataatatggcagatctaggagggatagattggagaacagagacatcagttaagaattttaatggtacaagcaaataataatgaggtcctaaactagggtagtagcagtgggcattaaaagaaagaaccactgcagaagtaaaaattacagggcctagtaataactggatgtgacagagaaaggagatggaagagtcaaaggttatactatagttcctatcctaaatagtaacatttagtgataacatttagaagaaatctttatctagtactttatcaaaacttcacaccaactaccaaatggttctcagagcattggaacaagacaacaagttttccacttggaaatactttttaaaataacatgtgtgtgtataattttttttttttttttttttttgaggcagggtctcgctgtcgcccaggctggagtacagtagtacgatttcagctcactgcaacctttgcctccagggctcaagtgatcctcccacctcagccttcccagtagctgggactacaggtgagtgccaccatgcccagctatttttgtttgtttgtttgttcttaatagagatggggttttgtcatgttgctcaggctggtcttgaaaccctgggctcgagtgatctcgccttggcatcccaaagtgtcagccactgtgctcggccatatatattaaagttattctgaaatatttattttaaaacaattttgctagtttacttagagcatcccaattcctttaatgttattttaacatgtatttgcacaagactatctaaaggaaccaccactgaaaaaaagtatatgcaagattccattgagcttctatgaatagttactaaaaagtatatttctgcctgaacaagaggggtacagactacaatttgctaatatgtatgtgtcagtagataattatcaatccacagacttttaatcctcagatgtctattatatctgttattttatgttggatataaattcatttttggtcactgtaataattctaaaagcaaatgtgccataaaatacttctataatacatttgaaaacaagagaattcaataatttgggtactttctatttaacaaacactggggataaaaaaacaagtaaaatacaacctaaaaatgattattatagagtctattttcacttaaacagagaactatgactgaagtgttattaaagtatggattttatgcatgataagtatatttctaagtaaaattcccaatttaccatttcctgtcttgaataatcccaacaaaaccatttgaatcctcaagtaaaaatatatttatcacttaaatcagaaacaatgaattcaaaatggaaaagtagttaaagtctaaaatgttttttcccataaacttagaaagaattatcttctacttccataaatatattatgttttataacgatgtattgtgttaccacatacaacaaacctttatgaactgctcatataactgtttaattgttttcaatctctggctctgaacaattctagattgttgaagaatcttttgttgctgtcgaaacatattctacaaatataaaagaaaaaaaactgtgtaataacaatttgggtaaaattttaaatttagaaaaaataattctacattaaacttaaaagaaagtgttaaaaatcaatgcttttaaaattttaacaactattatgaccacatttagataatttatgttcaccactaatatgtaacaatatattaattctaccagttgctgaatgggaaattttaacaataatcaagtcatgtcttaattcttggtgatttcaatgtccacacagatgatccttccaataataatggttttccgtttcgtgacctgtttctcaatgattttggcctctaccctactttagccattgacttacatactcccaccctagattttgtcattactaataattctaaccactacacagtattagtaatggtaaactttctaagagatagatactcagcattcccctttcatagatgagtaaactgaggcataatctgtccatggtttcacagctacaattgctcaaacaagaatttgatccaaaacagtattgttgctggcatccaggctctaaccattatacatactgtttctctgtctatcctagtatttaaccactacttctttaccattctaacttactctttttagtactacagctcaataatctatcagtgccacaaatccatcctatctattttacactgtcatccctacccccaatatcctcacttgcaggtaacacaagtctggccattaaaagtcaacaatgttctgactacagacatccttaggtatcctggggggaccagttccaggacacccaacccctcaggagaccaaaatgtgcagatgctcgagttcctgttacaaaatggcatcatatttgcatataaccaatgcacatccttccacatactttaaatcatttctagatctcttataatacctaacacaatgtaaatgctgtatagttgtaacactggattatttttccaatttgcattttttcttttttctttttttttttttttcaagaaagggtctccctctgtcacccaggctggagtgcagtggcacaatctcggctcactgcagcctccgcctcccaggttcaagtgattctcccgcctcagcctcctgagtaacttggattataggcacacgccatcacagcccggctaatttttgtatttctagtagagatgggttttcaccatattggtcaggctggtctcaaactcccaacctcaggtgatccacccgcctcggcctcccaaagtgctgggattacaggcatgaaccaccaccacgcccagccttttccaaatatttttcatccacgattggttgaatacacagatgcggaacccttatatacagagggctaactatacaatgattggttcaagaatgggcaaatgatccaaactcccatcagtcatattttcccagaggaattttttgccagagctattgagaaagattttctcagtccactggggttactaaacttgtaataagcctaggactgtaaaaactatcttgcttactacatcaagacaccttactaagtactgatgacagaacccagatgacactacatgagcaaccccctccctgttcccatctggctatgcctgaagctaaactgccccgacttcttttacataaaccaatgatccttcttttgtactttgacaaatttctgtcacttggaaatgcaggaaccccaaacaatataaatgccttttatgagtatggtatgtgcctatacgtctgtggtttacagttcagtaggtttaaaacacatggccagcaatggttaatgaaacctggctcagttccactggtcacaataaaaggctaggttgtccattcctacttgagacttggttgattataaacctaatcatgataccaacaagtattttttcttcttgttcctcagctttctgcatatctaaatcccactgctgaaacaaagtcagaaactgctgagaatattcttggttaagcttctgcctgtaaaacataatgatgaattattgtcatatttcataccaatataaaaagaatttaaaacaaaactgagttgacacagttatactatataagaaaaggaaatacctgcagcttaagtcttctgatgggaaaccaaaaagtaaaattatgatttacactgattccagaagtattttttttctaacaaactaatagaagaaaagccctgtcacaagctttagctcttgaaaactaaggaagttttattgtatatataaattttcaaaaagaaattcatctgatctctaagcagtttatttttcatttttttcctattgaatatagattctgatataacaaatacattaaataaggtgattgtatttatcctataagatttctaaatagaaatagttcgcttaatttttttccctattttggcttaacaaaagattttatacaaaagaagagttaagtcagctaaaacatacaaattatatacgatacaagattggtgttcttctacattgttgaacataattcaccatcataagactaacggtttttatgacatttaccttttattcaactagtgtatttctagaatgaacataaattacttttaggctgggcatggtggttcatgcctataatcccagcacttgggaggctgaggtgagaggatcgcttgagcctaggagttcaagaccagcctgggcaacataatgagacccccatctcataaaacaacaacaaaaaacgaaattacttttataacctcacttgttacctaaaaggaaaaaagtgatctttattgattttttaggaaataatgtcaattctatgaaggagtgaggttatagggctacaggactatcatacttagagaaaaatcaagccaaatacattttcactagaaaccccagtaactagaatagtatttttcttttcttgttttttttgacagagtctcactctgttgcccaggctagagtgcagtgtcacgaccttggctcactgtaacctctgcctcctaggttcaagcgagcacgcctggttaatttttgtatttttagtagagatggagtttcaccatgttggccaggctggtctctaactcctgacctcaagtgatctgcctgccttggcctcccaaagtgctgggattactggcatgagccaccgtgccgatcctagaatagtatttttcataagtaatttataccagtaaatactaagaaatgtggctctaaaaaaaaagcaaccaccttacctttgatcttgttgtgttttccaaacatgttcaattttctggttactagttttgagagaagccttggtatacatttctagtctctttctcttggcaagaagagccttgttaatgtcaactagattgaaaataaaaattcattaaaatttaatgttgaaaaaagtattttgttcccacatattcaagtaaatatgggtaaggttggttcaacaatattggaaagacatttaaacttaaatttagaaataggcataatttcaaaatgcagaattgtttgcttactttttttttctgagaaaactctcagctactagcacccaaattctgattttcctaactggagataattttttaacttaggaacaataaaaaagagctaataaacaaaacaatgtgtcaaggacagactttaaatttccccatgagaaaacactgttaataaaggctaaatgtaggccagacgcggtggctcacacctgtaatcccagcactttgggagtctgaggcaggcagatcacaaggtcaaaagatcgagaccatcctgaccaacgtggtgaaagcctgtctctactaaaaatacaaaaattagctgggcgtggtggcgcacacctgtagtcacaactacttggcagactgaggcaggagaatcgcttgaacccgggaggcagaggttgcagtgagctgagattgcaccactgcactccagcctggggaca

SEQ ID NO: 94990 - DNA, 44113 bp, Homo sapiens
ctgtatctaagaaagagtcattaggccgggcacagtggctcacgcctgtaatcccagcactttgggaggcggaggtgggtggatcacttgaggccaggagttcgagaccagcctggccaacatggtaaaaccccatcctctgccaaaaacataaaaaaaaaaaaaaaaaagccgagcatggtggcgcacacctgtaatcccagctacctgggaggccaaggcaggagaatcacttgaacccaggaggtggaggctgcagtgagccaagatcatgccactgcactccagcctgggtgatagagccagactctgttaaaataaaataaataaaataaacactaataattcaaatggtaggcaacattgagcacttggcatacatacacatacagcatattatataatttcatctatcatcatcaccgcagccttcacattagacaccatctttatccctatttcatgaatgaggaaattgaggctcagagacttgactttagaagctatacaaacatcaattcacctggattttcaacaaatattaggaaagaaaaaaaaatcattgctctgaaaaaggcaatagtcttctagcccagtgcttctcaaagtttaatgtgcatatgaatcacctgggaattttgttaaaatgcagattctgattgagtagctctgatgtgggagccaagtttctgcatttataacaagcttcccaggtagcaccaatgttgctggtaaacagaccacactttgaacagcaaggctctagctaacataatttaaatcctcagtgatcagcttgattccttctttaaaaatgtatattaaaaaaaaaaatggggccaggcgtggtggctcatgcctgtaatctcagcactttgggagggtgaggcaggcggatcactaggtcaggagttggagaacagcctgaccaacatggtgaaaccccatctctactaaaaatacaaaaattagctgggcgtggtggtgcgcacctgtaatcccagctactcaggaggctgaggcaggagaatcacttgaacctgggaggcagagattgcagtgagccaagatcgcaccactgcactccagcctaggcaacagggcaaaactccatctcaaaacaaacacaaaaaacaaacaaaaaaaacctttcaaaaaataaatcttcacttataatagatttagtcaactctttaaacaaaatccttcaattatgggcagaggaagggttctctagaatacctttcaatttggtccttctggtcaatcctggaaagctgtatacgtagatgagaggttttagcttccggtcagaaaaagccacaacttcacaggggatgttagttgccatgacgcccacaattccattactacactgcagtacagtctttttcttggtttcaatattaataaatattacataattcccacaagggtagcaaatggtgttgtcgttgacaaaatgaacattctgcttagggaatccttgcacccatctttgggaaaagatatgtcaacatcaatataatacatttcaaatacttttttttttttaacaaagcaaagggtcatcaaaatctttgaaacatttctattttcatgtcctttctgcccccaatttctaagataaaagaacacacatgctggctgtgagatccatttgagtcaatgaattatagaaatttaaatgtagacctaaagttccgtaggtctcccaggccttcttcagataactttttcagcaaaggaaactctctgaccaaacctgagaaagtctcagaaggacttctggggtcttctatacttggaagacaaaaagtgaaaataacagagaaaagagcttgatctcaacacagtggcatcctgggccattcttttataattagtttgattttttaaaataaactttaaaaaacaactttgcataggacagcctgctttgtggttgttagcagagtaggaaaattgcttatttacacagatgaagagtatgtggccatattttagatttaaaaatacagataaacgtagaaaataaaaggaatgaagtcgacgtgaatgaaaggctagcacacaaaaagaacatactctcaagtaaggagtgcgtgctaggtgtatgctagaaaggagaggagatgaaggagattctatttttatttaaatattaaaggtatgcttgaagatggtggaaaaggcaagtgaaggacactggtttggtgagaaacctcgagacattagagtgtccaggactagcaggggatgctgtatagagtggaggtgggggctgggaggaacactctagaatgtaggggaaaaaatgccacctatatctgcgcagtgcttgatgcttttcaaaggctactataaatgcaaataaatccaaagctagtggataggagttagaaggaaaggattcagggacctaactttggggaaaatcaccaaaggtagcaaggacgggatccgggctgtcgccaggtggagggggagggggatgtgatcagaagacccggatcactagcgggaatcctgagctagaaggaagagatgaagggtgcaggggacgttgctgggtaagagacggagggtcagggtcgcagaataaggagtgggaaagacaactggggacggggtcaaggaacaaggggatggggagcggacaggggaggtcacacggggagggaggctgagggaaggcactgggggcagaggggaagaggtcgaagctgcggggaaagccgccctaaggaaccggagggagaggagggaggaggggacktggggcaggaggttccgcgagacccagatcggtcgcggggccgtgaacaccgcacctcacggacaaggacgcgccgccggcggagtgggggccttcgtcgcgctcccggccttgcgccatgggcagtgttttcctcaggcgggagcaggcagcgcacgcagcaccccagggcgggtcggttacctttccgccgccgcggggctgcgggccgcgacgccgctgctgtgtacacccgtatcccggagaccgtaagccccgcgcccattggctctgcgctttggcccgctcccttctgagccgagcagattggtggaaggtctgccgctctcggccaatgggtgagcggcaagccaagcgaggggcgggccccttgctgttcaaagtgtggtctgtttaccagcaacattggtgctacctgggaagcttgttataaatgcagaaacttggctcccacaccagatctactcaatcagaatctgcattttaacaaatttccccaggtccgggccaataattgcaagtaagactcatgcctacaatctccgcgctttcgaaggtcagagcgggaggatcgcttgaggctaggagttgaagaccagcctggaagacatagcgaaacctgccgcgcccgtgccgcatctctacaaaaaaatttaaaaagcagccgggcatggtggtgcacgcctgtagtcccagctacttgggagactgaagtgggaggatcgcttgagcccaggagttcaaggctgcggtgagctgggatgacgccacagcactccagcctgggcgacagagcgagacctgtctctaaataaataattatttttaaaaattaataaatttctaaacagactttcatttagagtgctgactgtgccaaacattgttgcaacgtcttcacatctcccatcagccccattttacagataagtaacgtgaggaaaagagaagcacataatttgtccatggctacaaagttgagtgggactttatttatttatattatttatttatttatttttgagatagggtctcactccgttgcccaggctggagggcagtggcttgatcttggctcactgcaacctccatctcctgggttcaagcgattctcctgcctcagcctcccaagtagctgagattacaggcacgtgctaccatgcccagctaattttttgtatttttagtagagacgggttttcaccatgatgaccaggctggtttcaaattcttgacctcaagtgattcgcccgccttggcctcccagagtgctgcgattacaggcgtgagccaccttgcccagccctgagtgggacttaaacgcaggtctagctaatttagagctccaagcccttaagtaccatataacactttgaaatgtaccctcttgcttcctcagggaagcagacagctctggaagtaacctgattgaatggtcggcagcttgtcattccttcttctctcccataccttcccttagactccctcccttacccttcttcctttcccttcagtcgtcttcccttctctacccttcccttcctttctttaggtctttccttcctgtcttgctttcttctctccatttctttcacaaatatttacagagcatcccgcatgcattcatgcatgtgctagtcacttggaaaaaatagaaaaacaaataaagtttcttccttcttggaacttagagactggtgggatccagggagttgggctagatatccacatggtctcagatggtctgtgtaagttgtgaaaggatttatgaaagtgattttatgcaagaaatgttgtacaattcacggattgttaggcctcctaaatgcttcatacaatgccctatgactcttactgtacaacttgcctgcttaagtaagggtgagccctgtggacatgtggagttagctatgccctctagctatgctagagagtcagctgttatctgcacttctgcctgttgtgtcctaggctaggctccacacctagtacacaattaaaatctcttacttaccaaggttttcaccaaaaataaaagttgcaaaaagttaacattataacatgtaattaaaactactaaagaaacagttttacatgcaaggtgtgtaaagaaagtaaaatgtgtttttggtgaaagattataagaagtaatgggaatgtggatttttctctgcctacatttaagtgttaaaggattgctttaagtaaaaaaaaaactaaaggtttaaataagttgtggaaggtttataaaaattaattgtaagagattctgtatgtgaacatactggctaaagttacaggggtattattcagtttttcgataaattaaacattggaataaaagcacaacaggtttttcttagagttgatctgctctttcacacacacacacacacacacacaattgtaaagggttatacgaggtttataagactcttaccttatggttaacattaaaattgggtaaatatgtctataaggttttattaaaaattgggtttaacattaatagcacattaatgtaaaggtaaaatttggcttatttgctataaaaatcatataggaagcattgccaaatatgaaatggttttttgctttttttggactatatttgcataaatgtgttattggtatatgttacaaagttatgagaaactcttataattctaatatgacttagtgtagattattaataattataattgttatgtaaaattttgtgtgccacataggtaaccaagtttccttatcaattgtggctttaatagtggctatcctaaaactttttatcatccacaattgttttcttgttctaatcctctttagaaggtggtttataatcaactgtagaactccagcaggtgttcccaaatgcaggtttccaataactttggaaattgtaacattagaatagaggaaacaactttcagaaccctcatgtagagctggaatgttcatgaatatcagagtcaaggaaacttttcttttgagctatttacagcttttagcaattgagtatacttctgtgaacaaaatttggagtatatttgtttctctctacctgatttttccaaaatttggaaactatttgtgagtattcttaatttatggcaatatagttatttgcatacatgcaataaggatctgttttcttttgtagcagaacacaattggataaattggttatttcaccacggctttaactggaatggtgtgctttcctttaaggratcaaacttgacttgtaaagccaataaaagccacttggagaattggcctcagatcttgtctgcaactgtccctgtaaaggtaagtaaagaatgacctgtggtaagtaaagaatgtcactttctggcaggtccaggagtcctaagttatcttgggacctcaagagaacaggaatttactcaactcatagatatttgaggatacaaacacatggccgagcttggctttacaaagtcttgtctaagattacttctatagagcagagttccatcaaagctaatttaaaaagagcctatgtgaaaaataattatttttgttgcactttatacaaataatcaggccaagtataacaaagcaaatcagccttaccatgatttgtctttagtaaaaatgagaaactggagagagaaatattatgtttcaagtactgtggtatacttgttattaaattctagtctcattagttgtttttaagttcgtttctgcaatttaggctaaccctgcttattcctgtgaaccaaccaatgatctctgactgctgctcagaataaacaaaagggatgggtaatgtaaaaatctggatcagtattctaattccgggcacatcacattcagctaataaccccatatcagcttagttccaacagctgcccagttcatgaaaagccttctaatttagcttacttggaacaactttacttattttgctctacccttgtggaatatrttgctgttatactctttgtgtaggaatacaggacaagcttactaaatgttttcttaaacacgtattaatcttccagatatcaccttttgtcaaaactcaacagttatgaatggaccttaccatactgatgttctctgactgaactcctctctaccctgaatgcaagagaccctcatagttaggcaggwatatcatcgcccctattcagcctgaaaaagttacaaaagatggatcttygtccctctgcaacccttaggattaagggttctcttataaaagacaagggggaaatgtcagaggcatgtgaacaagagcaactccatcttaaataggagctgggcaaaacgaggctgaaacctactgggctgcatttccagatggttaggcattctaagtcacaggatgaaataggaggtcagcacaaaatacaggtcataaagaccttgctgataaaataatttgcagtaaaggagccrgccaaaacccaccaaaaccaaaatggcgacgagagtgacctctggtcatcctcactgctacactctcaccagcttcatgacagtttacaaatgccatggcaacatcaggaagttaccctagatggtctaaaaaggggaggcatgagtaatccactccttgtttagtatatcatcttttattcctttactttcttaataaacttgctttcactttgcactgcggagtcaccctgaattcgttcttgcgtgagatccaagaaccctctcttggggtstggatcaggacccctttcctataacaacatcattatgcaaatagaattatagattgaaataagaagaaaagaaacatgatagtatgaatgcttatgttaggatcctcgcctagtgacaaagattctctgcctggtcaaactttcgtcaggctactgagcctttccctaggcttgtctgcgcccttccttgtaagatccggttttagcaaagaacactgctaagtcagtttggcaacactgctaagtcagtcagtcagtgtcctcagtgtctgatcaccctccatatctgatcaggttcctcattctctaccgtcccccaggtgatgtctgattaccttggcctatgtgaacccaaaatatctgagacaggtctcaatcaatttagaaagtttattttgctaagattaagaacatgcccatgacacagcctcaggaggtcctgacatgtgcccatggtggtcggggcacagcttggttgtgtacattttagggagacatgagacatcctacacratatgtttaagatgtacattggttcactcaggtcatagggagataagagataaaagattgcattcctttgagtctctgattagcttttcactgaatacaacaatttacatatgagaggagggtagaggaatagtcacttatgcctaagtctggcttagtgaaacaacagggcagagaaagccatcagatatacagttgtctcttgtgaccagagggacaactttgagttttgtctgtcctttgtccacaaggaatttccttgtgggaaaattatgagggaggtatgtagctttttttatatttgtagctatcttatgtggraataaaatgggaggcagatttgcctgacacagttcccagcttgactttccctttggcttagtgatttgagggccccaagatttattttcctttcatacctgtcttcagcaagaagcccattaggtcaatttagccagaatcctccatcakccctgatggtttcttatagtaattttccatccactgacccccaccctgctccttggctataaattcccacttgcccatgctatatttagagttgagctctgtactcaaacttccattgtcatggttcctatacctttcatgatggtcctgagtaaaggtggccttaccgtgctttagcaagtaccgttgaataattcgttctttaacacgagctgaatgggcagtgttagggatggtctctgtgtgcatgcaccgctttcactgagggtcaaaccatgaggagtgattgctggatgggggtgggatgggctgaggataatttttataaagacactaaggcagggccacagattggatgaactgggaagggcagtgtgattggtgcagagggagataagaagaaaatacttaagatgaggctagtgaaggaaccaatggccaggtgaaggacaagttgaaagttctggcctttatcctaagagccatgaaaagactattggggcttagagcccaggagttcaagaccagcctaggtaacatagtgagacttcatttctactaaaaatacaaaaattagatgggcatggtggcatgtgcatatagtcccagctgtttgggaggctgaggcaggaggatcagttgagccttggtaggtcgaggctgcagtaattcatgatctcaccactgcactccagcctgggtgacagagtgagaccctatctcaaaaaaataaataaataagtaaataaaagtataatgctttggyatgctgaatactttgaattaaagaagactggaaggcctcagaagcaaagtttctctccgacctttttctgttttcctgtctcctgcccctgtttctccccmaaagcaagtcatagacaccagaattcctcttccccaaggtgggtcatagaaactattaatatatatattgtatatattatagaaccccctccctcaaagcaaggcataaaaacctggaaatattactctaaccttcccctgcctttatttgtaggaactggccataaagaaattctctagcctacctgtctaatgtagatcataagcatcttattccagaggggtcctgctctgtacccagcaggaaggaatcctactcggagaggccacaaagaatgtaaatagatgggccttgctgggttcccctttcagtctgttaccattagatcataccctttttgtccaatcacatttctacacagctgtccgttcttcatggagcctaaacataaaaatacttttccctgggtctttgagtctttatttctgaaggctcctgtgtcgtgtaaaactttgatttaacaaatttgtcatgcttttctctggttagtctgtcttttgttataggagtgtcggctataacccttatgatagatgaggaaaggtatcacaccttctcctcccctataagacattaaggggttttcagcaggggagtgacaggatcaggtctatgcttttaaaagatcatttggctgcaggattatcaattggttggggtgggagaacagggagaattgaaataggcagatcagtcgggagtctattccattctcctaacaagtggagccaatgcaggatttctcaaattcagcactatcggtattctgggctagatttggcgattgttggtagagtcctgtgcattgcagggtgtttagcaatgtagcacctctgcagttttgacaaccaaaaaygtctatgcacattgtcaaatgtcccctggatagcacaatcactccccagttgaaaaccactggtaagtcagtgtattaaaaagttattttaaaaggtaaaaatctataggatttggtgatggattgataaaaagaggaaagggagaaaggagagtcaaggatgttcctagatttctaattaccacagagatggtggtgctcttcactgagacggggtgaggaggaaatggagacacgtgtttctatgcagaaatgtgagtgccagacacacaccatgcttagttcttaaaaactcataaaactgactgacaaaatctcaagttgcagagtcccagggagaagtggcaaggaggaaaagtcaaactttctcttgccacccctgatgactttgcttatttgtgttttgaccaagccctctccaccccaccctcatacctttaaccacaactaagaaagaaaggccactcatccttctgcaaccaggcccggtgtgggggtcagggaatctcctgaatatcaactatgggtatccccagaaacccagctagagacctcccttaattttaaagccaaccctagagcagaatgtgaggaggccagtcttgccctgctcccaaagtaagtgactggcagaggatgaaargtaggcaggaaatatagacttcgggaaagagatgctggcctggaatcagcagtgaccctgggaagctgaacttaccctgtgttacagcaaaagaggaactgaatggaatcaaattgaaaaggcagtcttgtgtgtatcttactcttgaaatcttggtgttatggtttagatggaaagggaggtctctggctgagtttctggggataccagaatgttctgatatgcaagagattacctgacccctacaccrtgccagattacagaaggatgagtggtctttctttcttattctggaaggggaaatgcagatcatcccagagaatggactgggaaggataagttaggaaaatcggttccagttctcacattgaaagatttatgggtattagaaacaaaatctaagacacacaagtttttctctaatcagtgacccagtgagcagtcctgggcttcctaaagtaataaccagtgtgttccaycatttttaggaagggctcaactcccctaaactggccttgcccctcccaatcttctcttccctggcaaatctccaccttgccaccaacagcctagtccttgacagaatacgcctaatcctcagtgtgaggttttatacttttgtagaactcagcttgtattaaaggctaaaagagcagtggttaattcaagttcatggagcaagccctaaaaccaaactagtccacagccagtcacagaacaaaaaaatccttatttcccactaagggatcatttcagtcctggcttctgtagggttccagccaaattccaagataatctgcaagatgaaatttcactaagtttttcacccattaattaagttttctatgaccatttaaacatgggaaaaaaatcatacagcatactagaacttattttattaagtagatgagtaagtggtttcctgtttatcagctaattatttgctttttgtgaaatgcaccttgtttatgcaaaaagtcaaaaaaataagttggcattgtttctctgtgtaaaaagaaatgtaaataatkaatgtttttaaaataaaggaataatctgctgtgatagagagtatctagttattctatggcaattgaccccttttatagcagcgatgaccacaatttactaagcagctattacgtgtttggagctccatagattctgaatgctcccaccaactatgctacataggaacctgtggctcagagagatgagtgagactcaagattacacatttagttagtaggcagagttggattcaatcatgggttcacctgcccctgaagtctgcatttatttttattttttttttgtagagatggggtcttgctatgttgcccaagctggtcttgaactcctggtctcaagcaatattcccaccctggccacccgaagtgctgggattacaagtgtgagccactgcgtctggcctaaagtctacgtcttctgcacagtttttctctctgctctgccgccgcatccacgcatgtttgtataataatagctaacttatattaagccactcctctgtgcctggcattgtacatccttataaaacctgtattatttaatccttattgtagagacaggaaagatgagtctcagaaagttaagattttttgcccaacatctcacaagtttcaaatgaacttgaattcaggtagttaattgtctgaaaataactcttctttccagcagacttgtaaatttcaaagtaaattggacatttagtttaaattttgcatttttctggaaaaagagaggaaaaataggaaatccttcataatttccaaaagttttagaataaataatatgggaagaggctacattgttatggatatcctgggccacttagtgaaaatggctgaatgttattatttggtgcgtttaatctacaaattcagacttcattttcaagcttcaaatattttcgagatatctgtggagtatagctttatgactaaattttgtgtcccaagatgcttcctttactcttgatgctgaaataactacactaggttaaatacagaaagggtttgtaggtcaacattcaggaaaatagcacactgaacatgtggttttaaataatgttttaatgaagaagaatgagaaggttattttgcaagacagaggggattgtcacattacgcttacctagaattctaaggcaagaatattaatggagactcataaatcatttgttcaattattttcaaattagttcttaaaatttaaaagtcaaatacaaattataagattgaaaattaaaaattcaaatcaaaaatttttaaagcaaatatttttaatttaaatgaaatttattacayatttttatataaatttgcaattctaatrtttattatttatctagttgtcaaataattggtatcaagcttcatacatgttatatctagacctacatacctacagaaatgtaggactaatacatttttttctatattgcaaaacattcttcagcatccatgtgcagctattgccaataccacactaactcatgacaacccctggaaccaaatggagttggaatcaaagagacacaagaaaatagtcacttgattgtactgggaaacaatacttaattattcacaaagcaatactgaatgaatgaatacactcatgctctctgaaaaagggagtcaacaaattccttaatatatttttctgagatggagtcttgctctgtcacccaggctggagtgcagtggcacaattttagctcactgcaacctctgtctcccaggttcaccctattctcctgcctcagcctcccgagtagatggaatgacaggcacacgccaccacgcctggctaattctttgtatttttagtagagatgggatttcgccatgttggccaggctggtctgtaactcctgacctcaggtgatctgcctgccttggcctctcaaagtgttgggattacaggcatgagccacagcacctggccaatatcttttatcttatccaagcattcccaccctccccatactccttaagtagtttccatctctgatgttgaaagaggcacaacacacaaacctcacagtgtccaaacacagtagccttttgtttcaaggacatggggctaacgtgaagtcatgtggcagatcttcagagtcacatcatgctgggagagtgttgagaggtggatcccacatgacagtggtgtaggccctctaaagggtggggcccatggcaggggcacaccttgtggggtctatgggtggcactatttttactggtggaaggtatttgagttacggggggcaaatcagaacaggtgtgtaactcaactcttgcctcttcagaagaaagaatttgaggggcataaagcagaaaaagagaccgaggcaagtttcagagcaggagtggaagtttattttaaaaggctttagaacaagaaagataggaaagtacacttggaagagatccaagcatgcgacttgaagaataagcgcaatgtttaaccttgatcctaggactttataggctagcccctttcccataattcttcccttagggtgggctgcccacacgcacaatgcctctttacctttgggaactgagcacacacagtgtgtttaggaagttgtacacatggccatctgaggctttctgcccttttctgggggagtgcccctagaaggtcatactctaccactgtcttttttttttttttttttttgagaccgagtttcactcttgttgcccaggctggaatgcaatggcgcaatcttggctcactgcaacctccgcctcctgggttcaagagcttcttctcctgcctcagcctcccaagtagctgggattacaggcatgtgccaccacacccagctaattttgtatttttagtagagatggggtttctccatgttggtcaggctggtctcaaactygcgacctcaggtgatctgcctgcctcggcctcccaaagtgctgggattacagacgtgaaccacttcacccggcccattttgtctgttaatgcatatgcccagaaagttgcttctctctggtgcccgcattcaattaacactttagtgcagtaattgtggaccatcagaaaatggcctctccctggctccagctgccaatttatcacttttagagaggcaatgtgataattgctgaaccatcacctgacattcctagtgggcgggggagagctgtctcctgccctgctcatgcctaactgcctgtaacactatggtacatgtttgagaaactagtacttactgaaagataaaataacataggaggaagactttgtaggagacaacaaaaggggaagacagtggaatttataagaatgacaaaatacattgcagagtaatataaagtaaggaatttacccccttgaagtacttggtttgtggtgggcatgggacttctgatatgtcttggagccttggatgccaggtaattaccagttttgcagaacactgacatctatggactctaacatggactccatttaaagaactccaaggacgattaataaacaaaaacacaaatcaatttgcactgttgcctaaatatcacctaaaatagcacgttaggaaagcaccaagtaccaagtgtgtgaagacatggtctgaagaagtgtctgaagaccatcattccacatttcacattgaataatatcatgaagacttaagatcctcttaaaaagcttcaaagctcatctttattaatttctcacaaaagtaaacctcttcccaaaagtataaacttaaaactactaatgtatcaatatattctattttgtgtcgtctcatcgtgagaggtgacagcgtgctggcagccctcgcagccctcgctcgctctgggctcctcctctgcctgggcacccactctggcggtgcttgaggagccagcccttcagcccgccgctgcactgtgggagcccttttctgggctggccaaggccggagcgggctccctcagcttgcggggaggtgtggagggagaggcgtgggcgggaaccggggctgcccacggtgcttgcgggccagcgcgagttctgggtgggcrtgggctcggcggccctgcactcggagcggccggctggccccaccaccccgggcagtaaggggcttagcacccaggtcagcagctgtggaggacgcacagggtcccccagcagtgccagcccactggcgctgcgctcgatttctcgctgggccttagccacctccccatggggcagggctccggacctgcagcccgccatgcctaaacctccccactccgccgtgggctcctgtgccacccgagcctccccgaccagcactgcccactgctccagggcgcctggtcccatcgaccacccaagggctgagacctgccagcgcacagtgcaggactggcaggcagctccacctgcagccctgtgcaggatccactgggtgaagccagctgggctcctgagtttggtagggacttggagaatctttatgtctagctaagggattgtaaatacaccaatcagcactctgtatctagctcaaggtttgtaaatgcaccaatcagtgctctgtgtctagctaatctagtggggacttggagaacttttgtgtctagctcagggattataaatgcacaaatcagcaccctgtcaaaacggaccaatcagctctctgtaaaatggaccaatcagcaggatgtgggtggggccagataagggaataaaagcaggctgcctgagctagcagtggcaacttgctcaggtccgtttctgtggcgtggaagccttgtcttttckctcctygcagtaaatcttgctgctccttgcagtaaatcttgctgctgctcgccatttgggtccacactgcgtttatgagctgtaacactcactgcaaaggtctgcagcttcacttatgaaggcagcaagaccatgaacccagcgggaggaacaaacgactccagatgtgcggccttaagagctgtaacactcatcgtgaaggtccgcagcttcactcttgaagccagcragacaacgaacccaccagaaagaactctgaacacatcggaacatcagaaggaacaacttccagacacgccgcctttaagaactgtaacactcaccgcaagggtctatggcttcattcttgaagtcagtgagaccaagaatccaccaattctgtacacaattggacttccctttaatttttttggcttttagggtttttcatattgcttgtgttcccttagacrggagacaaacaatactttccagaaaaatacatgttttggggcctttttcactagtaaaaacctggcataacaataaaactaactttgcaaatattatgacagtgcaagaagtccagcatggctgactgcatcttgcttctagcctcacaggctgcctgtcctcgctcattcctgggtgtaggctcagctaaccccgggaggaatttagtttatggtttaackttgaagcaaggatggtaatagtctgtccctaaaactgatcccctcattatctggggactgaaaccacctttgtaagactaatgaaaaagacacaagattaggcgtgtgggagagacctgaattctgctaaaatgtaagcatggtgaaatgataaccaactattgttttgtataatccctgagtattaaaatgtaggtgtagttaagcagtactaccagcagttactatttcctagcttgcttttctataatttcttactgttcaggagtcatgaagtcagaggtcataagatttgtaattgcttctacagttgacatcactattgtcaaaacctaagactggtttttgaaatacttttcagacttctgcattctggtaactaactccacccagacccatgattcgtatcaaggaactgactcaactgttggtccccacccagaattgattcagcacttggagacagtttggacactcctatgatttcatccccaaccaatcagcagcacccattctcttagtctgctacacaccaaattatccttaaaagccctagcttctgagctctcgtagaggcagatttgagaattatctcctgtcctaccacttatctggccctgtgatgattaaactcctctactgcaacaccactgtctcagagaatggctttatctgtgcagcaggcaagatgaacccattaggtgattacagtaagtttagaagtaggtgttttgttgtattctatgacaaaaatttgagttaacataagtgaggatgaagtggtgaaaatatttgagttcagattatactctcagaggctacgtggcatggagaaaaaagccctcgaccttaaagttcatggttcttattctatctctgccttttactaggtctgttataactggaaaagccacttaacctctctgaatcttaacttcatctgtaaagtggatctgatatttccctgtctaccctcacaggattgtggtgaagatcagataaagtcatgtacataaaaaaggactttcatagaaaatgtacgatacagttatgtggtcttgttacatagttgcaagtcatttccccttagctgttgagtctgggaagaaaagtggtttayaggcacactgaaacaatatgccctgtctaggcaggatacatggtaacaagactatgttagttttttaaattttttttctgagttcatagaatactattgtgagctaattctcagaaggaaggctataaatttcccttaaattgttaattagcatttataacacacatttgtgctctagagcagttctgagttggaacgtatyagtggttggtaagatctgcttactaagttgtaaccaacatgtctttaaaatgaacggaacaaaaaaacttcacagtgcatcccaatggtaagtgtaaattctgttttaggggtgtgtgtgtgtgtatgtattttttattggacattaaataaaatacatttttttctttaaaaatgtcagtaagtactttagggggactgtgagggagacaaactgtatttagtcagctctaagatcaactgacaaggagggaataattaaataaataaccaattaaattacaacagaatcctaaaatttttatttaacgcttattgaaagagctcttttaagcccagatttttatgataaaagaactcttaagcttatttagaaatgatttttattctattttactcttgtgcaagtataaaaaggaaaatataagttatataaagtattcattcaacttttagaatccagctcttttgaataatttttaaaatcagcatcataggcattcatttccccaactcattcatcccatagcattgtcctctgtgccaagaagatcatttaattccataatgcagcaagaatgttctgttatctctgggattttcttccaaagccattgacagctaccctgcaagtccaagcaagagcaataacatcagtgtcaaaactgctacacagcctgctgtaattttagatacacttccatttttagaggtatttaaacatgaaraaatgtgaatcttagaatccatgagatatggtagcagtcttaactgctacctgatctctcgatcagacttaggtgtcagactgatgggtgaagccagctgggcttctggatcgggtagggacttggagtacttttctgtctagctaaatggttgtaaacacgcaaatcagcactctgtgtctagctaaaggtttgtaaacacaccaatgagcactctgtaaaaatgcaccaatcagcgctctgtgtctaactaaaggtttgtaaacgcaccaatcagcactctgttaaaaacggaccaatcagcactccgtaaaatggaccaaacagcacgacatgggcggggccaaataagggaataaaagctggccaccggagccagcaggggcaacaggctggagtccccttccgggctgtgggagctttgttcttttgctcttcacaataaatcttactgctgctcactctttgggtctgcactaggtttatgagctgtaacactcactgtgagggtctgcagcttcattcctgaagtcagtgagacsgtaaacccccgggaggaacaaacaactctggacgcagcamctttaagagctataagactcactgcaraggtctgcagcttcactcctgaagtcagcgagaccatgaacccaccagaaggaagaaactccggacacatctgaacatctgaaggaacaaactctggacacacgatctttaagaactgtaacactcactgcgagggtccgcagcttcattcttgaagtcagcgagaccaagaacccaccggaaggaataaattccagacacaagaccagagttgacaacccatctccaccataaaaaatayattgattttgagaaaatcacttaacctgtgccccccagtttccctatccctgagatggtaatattaacagtatttaaatcttaggattgttgtgaggattaaagactttccaggtagaacatttaggagataactggcaggacatgtacattcaacagatgagattacctcctgcatgctgttttacaacatttttatttaacagtgtatctctggcatgtttctgcatcagtatatatgaatctacttcattacttttaacagttgtcttttaacagtaggttttttttttcctgttctttaaaaaatgtttcttaaatcttaatttttcccaatatagcgtatattaagagtaaaaaatcaaagtgaatagaaagcttttcaaatgacagcagtcgccacctcatttctccccacctgatcctttcccatctcaatgccattctctagaagccaccttccaactgaagaaacagaagggaaccaataccctggaagcacctccctacatcatgcacccacccttttccattcccttcctttcccctggatgtagctaccatcctgaattctgtgattattgttccctgcttttcaattctaccatgtatgcatgagccataactaatgtgctgtttcactttgcctgtttttaaagttaacacatgtagaatcataccatatatattattgtgacttgctattctggctcaatatcatgtttttgagagggatttaagttgataactatagctgtagactatttgttttcattgttgggtagatgtccattatatgaatacaacacaatttatccattcttctttcaatggacttttaatatcccctcaattttttttctattcaagcttcttcttttttttttttttttttgagacaaagtctcactcactctgttgcccaggctggagtgcaatggcatgaactcttgatctttaaccagcagaatcctctcagattagtctcttaggttattaagaaatgtagttgtaaaaacgcatgtattgtttccttttaactgtggctatgggcagcatgtcaacataaaaggaagagggtgaaccaaaattaatgcaattaggtaatttgagccaaggttgagggttgcaacccaggagtataggttcaagttgctctgaatagatactctcattagcagcagttacaagtggatttctaaaggcaaaaaggggcttcaggaagtgggctgacataragttgtctgtcaggaattctcattggtttacagaaataacattgattagtagctggctacacattgttaagctatagactgtgggttatatttgctgtagcattattaggttaatttatagctacttgtggctataacaagcagtttcaagaggtgaatacatagctcgaagcggggagtggggcatgattgctgtctcattttaatgtctctttgggcctaataatttgaaatggctcacattcctcagatgaaagttctattctttcctcaggtgtatattcagatgtttacacaaccacaaaggacttggagaggacctattgtaatgcacaccagtaatatagtacggtagttcactgggagagtatattttcaatttctttctttgaggaattaaccttttactttatttattgatgaggtggatctttcaaatcattgcaataaaatattacattattcatactaaattaggggacagggcattccaagtaaaacttttaaagtaataccttgatgtgaaatttttttttggccattcagaagttttaccttgccaagtttcaatttacaaggttatttgcatgaagtcattaatgtgctaaaaagtcaatatccttaaaaagagttaagcagtgcccatattttagcaaaaatgtggtcgatttttaaaaatttatatctatttcttgcctatttactaaattaaatcaaaatatgtagtgatcacatttatttaacatattctatgccaagcactgctctgagtgctttctgtatagtaactaatttaatcctgccacagactctatgtcagagacgtttgaaccagagsgactccatcttgagtgagggctaggaagatgcggctgggacttgctgggccgcattcccagaaagttaggtattcctagcctctagatgtttatggttaagggaatagattgataatgtttactaaacagacccagacttaggagtgtccagatatcccgatatcttgagaacaaaggcattcctaattttgctttaaagataataatattgattcttgcaaaacatagtaattatgaaaattaaccctttatcacaaaaagagcacatctccccatatctttttttcatcctatatatacaggcattgaacctggggtggacgccttcgtcctcttactttcgggaacaccctactctgtctatggagtagctgttttttcaccactttactttcttaataaacttgcttttgttttgcayggtggactcgctctgaattctttcttatgcgagatccaagaaccctctcttgggtctggatcaggacccctttcccgtaacatctatgcaggaggaataacatgtgttccatcttattttacaggtgaggaaactgaaacacactgaggttagtgacttccccatgttcacagttaataagtggttgttacgggttgaattgtgctcccccaatttcatacattgatgttctaatccccagtgccccagtatgtgaccttatttggaaatagggttgttgcagatgtaactaaattaaaatgaggtcatactggagtgtgaatgaagatgaaggcacagatggggtgggtggtgcttctgcactccaagggacaccaaagattccctcaaaccactagaagctgggagagaggcatggaacagactccctcacagactccctcctcagaaggcagcaaccctgctgacaccttcatcttggacttgtagcctctagaactgtgaggcaacacacttctgttatttaagccactctgcagtactttgttaccctagtcctagcaactgaatacaggggtggagccaggatcaaaacaggcagggtgctccaacacttggtgcttttcacctcattctctgctcctcccataatagggctaatcaaaataaaaatagacatctaccccaatctcaccccaataaatggcacaggagttaccagctttcaaatctaggcaaacaaggaaatcattgaatagtctttttcctcatctgtatgatggccctggaacccctctttcctgacccctaagttaaaagagctgtttgagaggactctctggccagacctttattcccagacccaaaactaaattcactcatgccacctgcttgattctgagcctgtgcccttattgtaactgaaatgcaggttcagttgcttcccgctttcagagtccaattattaataagaagagcaaagtctggtataaagaaagtgattttttattccaaagctagcttaggggragcaaaacaggcttcctgccttaagggtaccactttgcttctggggcagaaagcaggggcttttaaagggggcagttggtatgaactgcatgctggggagggagcgagtgggtgggggttcgcatgactcactttggtgctttatctgctgggttgtgccatcatgggcagaagtcatttgtaaagtggccttgtctcaggcatacttttggatgtaaatgractgttatctctggaggcagtctcctggggggtgagagtcctgctctggagcttttaagtaaacacccagttagataagcttgccctgtagggagtgtcaggtgaagggaaggtaaaagatgataattgcatttctaaagagctaagtaggaagtggggaacagggagaaaggaggaaacagagaagatgggagaaataaataatgtaaaaaataactcatcctctatctcttagaaaaatgggagtactgttatattaccagggctccaaaacacaaatgtttaataagtgggagagttttgaaagcagcaccattattctgaggttgataatatccaggtttgtgctgtctcctatgggttaaaatgaaaaggatgtatcctacaggtgacgrtagggacagaggccctcccagtagtcacgttaagctagtactgacagaaaaaggaaaagcctgtccaggtggctgggcaaccctgcagcgaggcatagatgagcttgtaaatcaaaggaaatgaccaaggtgagtctcaatccttttagaggtttattttgccaaggttgaggacacatctgagaaaaaggaacacaaaatcacaggaacatctgtgatctgtgctctttccaaagagggcttgaggacttcaatatttaaagggaaagagcaggcagtaggggaaagtggaaagtaaaaagggaaggtagataaaaggggagagtagttgcattctttggggcctttgatcagcattcactgaatgcgcatgttacattcgtgaaaggaggtcgtagaggaatagtcagttatgcattcgtctagtgcttggtgaatctgcatttttacaagattaaatatagggtagaggaagcggtcaaattgcatttttctccagcgagaggaaggatgactcctagacctgtctttgtcccatacttgggaagataagctgttagtttacattgccaagatgaaattcaactgatctgttttagagtaaagatcttgcgggccaacaaggaatttccttggggaggtgtgtggcctttgatctttgtagctatttagcaacaaaatgggaggcagtgttgcctgactcagtttccaagcttgactcttccctttggcatagtgagtttggagtcaagagatttttattttcccttcacaagctgaacaggagcctttggagagaacgctctggaccggtgagtgagccatgaggtcgggccacaggctctgaagtcgtgaagccttgggacggagcgggtggtgcttcgaggtcagtgtcacgggagggaggtcagggtcagggtcrgacgtggagccccgtggagtgcggagtggtgaccccttcgttcgggggcggagggatgactgagcatttataacttytgtgtatctccccgtgggtgcarcccttggccagcgwgatgctttgacacagccccttaagatgttttaagggctatcccataaagccgggaaggcacaacgggtggagctggcggccgccgggggcaggcacttttgagctaaggaggaagcgggggagggaaggagggcgggaaggacgcgccacctacttcctgaatcccctgcaaaccccagaggagctcggcctgcgctgcgccacgatgtccggggagtcagccaggagcttggggaagggtgargcctgcccgccgcgaagagggggtgatctcggcgacccccggcggcatgttcgaggctgctccgggagcccagccgcccgggagcgccccaccggcggggaacgggtcggagctgcagtgggacgcgggggcggtgggatacggggggtctcgacacctctctgggccgtaatcgccttcgcttctccccggcaggaagcgcgcccccggggccggtcccggagggctcgatccgcatctacagcatgaggttctgcccgtttgctgagaggacgcgtctagtcctgaaggccaagggaatcaggtgggcacccaggcgggggacgctccccgagccgtccgggagcctgctgcaggcggcggggtggggtggggtctcagcccccttctamccccctcccaccagcgtcctttactgcacattaaactattctcggccctttggaaaatagcaagttataggccattcccctaggaaaaataggccacagattccaacggtctaggacacctcatttagattaaccaaccatttaatggattagaaaagctgaggctccagtgatgttagtgatttgcccggtaataaccggcagcagctcttttagctttggtaggtcacgaattcctggtccagagtcctttcgctttcgccctattgtgatttcccgttcttattccagcttaactgttagttgttattctgaatgtattgttccctcctagaatagtaatttaccccagtacagcagagtttagaccctgaccctcctagggtagtgctgagtttactgcacatattcctgtggattgggctgttggttgagtcaaatagagggaagtgtctgtctagctcatccttctgcagagcctgttttgaaactagcatagtttttgacttacgggctatccacaggatatgtgcaacagtcacttgacttttctctgacaccaagtatccattggaaccacttcccttcccatgacctttggatgtctgttgattagacatttattagatacctttggtgtggaaggttctgtggaagtttaaaacaaaccccctattcttaaggaattttctgtctgtgtgcttagtgtttgtgaactaattttagtcttctaaggggataatctttaggggtaggcaattattttccctaaaagaaaggtaaaatgcatttaaaaaatacatttgaaggggatttgtcattacttcactaagaaatgcatctcatttggatgagattatgattctgaacacatagagtacttactatttcataatgtttctcaaaaacactgtcatatttgctgtgatagaactcttttattgtactaagagaaatctaatgtaaccaaaattgaaaaaagacattttttggtactcatttatttgaaaagtccaggagcatgacacagstggattcagaggcacaaagtcctgggttatgtgcttcaccctggacctttagtttgaaaacaaccctaccttatttactggggcagttttccaaaggaacattgaaactatcttcccctaatagtgtggggtagaggggaggaagagagtggttaacagcttccagacagtgcaaacaacaaaggtctactacattaatagaccagttttaagcttgagcccgaggaggcttttactgggaaagtactagattttaaccacatgatatgacttaacaaagcatggttttctctaaaagatgcatcttccaacttgctgtggcaggtgygtagacttgttggctcacaatgccagcttaccaaaattcatgtgtgttctgacatacttttttttttttaaataacaaaagcccaggatctttttgttttcatagtaacaaaagtttttgttttatagttcaaaaatgttgataattctttggcaaggagccaaataattttttttttttttgcaatggctggtacttaagtgtccagtattgtcagcacatgaaccttttaaattacatgcacacctgtgctcatgttcaaattggatgttcctttgtttacatgggggattatgtatttaaatcctcaaatgaaatgctgttytagctacagctgtggatgggaaaatagaaaacaaaaggtattggtgtctattttttttttagtaatctgttctattgaacatttattcagccttgacaatcatatggacctagctcctttctcttagttcctctacagtctcaggcaacatacaagatagacctaaatacaatctgactatagcctggacttcacctgttttcttcctttttggtttactttgtatgatttactcagacaacattttttaaaaaatcagtacatggagatttaatctgaaagcttattttgtgggtggatttttttttttttttcgagacagggtctcgccctgtcacccaggctggaatgcagtggtgcaatcatggctcactgcaacctctgcctccagggctcaagcaatcttctcacctcagcatccggagtagccgagactacaggtgagtaccaccacacttggctaatttttatattttttgtagagatagggtttcatcatgttgcccaggctggtcttgaactcctgggtttaagcaatccgcccactgcagtctcccaaggttctgggattacagatgtaagctaccaagcctggccttgtgggtggattttaaggattccttaatatcttcataaaaaccaagaaactttttactcaaattagcaaaataaattgaattttatgttggttctcatatagtggatagtggacacaattcaattagttgcctcatatgatttataactaagatacctcttagccataaatggagtatcttattgacaattttgaagcatttccacagatttattcattcatttatatgaaatatttcaaaacaaaaatatttactgagtccttatttgaaactttttattttcttcagagcatttatatctatatagcattttgctcatttacatgtttgtttattactatgaacagatacacaagatcccacctttcgtgaagcttacattctaggaagataacaaacttgtaaataagtgagcaaagtaatttcagatacatattatcagttcaatgaagaaagtaaaacatgataatcatgtaatagaagctgctcagcaacttcagagctatggtcagggagggcctggggatgtgtgtttgacctgggaagacctgggaaaaggcaggcagaggaggcagaggaccatcaagtgcaaagactctaaggtggaaacacatttggcaaattcaaggaatataaaaaccgccaacgtgtaaaagaaaacataggggaaaagcttcatgacactggccttggcaatgatttcctggacatgacaccaaagaccaggcaacaagaccaaaaataaacacatgagactacagcaaacaagcttccacacagcaaaggaaacgattaacagagcaaaaaggcaacctatggaataggagaaagtacttgcaaaccacatacctggtaaggggttaatctccaaaatacataaggaatctctacaactcaacaacaaaaaaacctgattttaacatgggctaagatcttacatagacacttctcaggctgggcatggtagctcacgcctataaccccgaggcagacagttcacttgagcccaggagttcaagaccagccttggcaacatggcagaatcctgtctctacaaagaaattagctgggtgtgatggtgcacgcctgtggtcccaactactcgggaggtaggaggatcgctttagcccaggaggtcgaggctgcagtgagctgcgrtcaagccactgtactccagtctgggagacagagtgtcaaaaaaaattaaaaattaaaaaaatagacatttcttcaaagaggatataaaaatgggcaacacatatatgaaaaagttcttatcactaatcatcaggaaaatgcaaatcaaaatcacataataacctcacacttgtcaagatgactataatgaaaaaagacaagtgttagcaaggatgtgtagaaatcagaacctttgcacacygttggcgggaatgtaaaatggtacagctgctatggaaaacagtatagatgttcttcaaaaaattaaaactagaactaccatgtgattcagcaatctcactactgggtatatatccaaattaaatgaaatcaagttctcaaagagatattagcactctcacgtagactgcagcactgttcacaacagcataatgtcaatgtccatcagcagatgaatggataaagaaaatgtgttaatgctattccacctaaaaaggaaggaaattctgcaatatgtgacaacatggatggacattgcggacattatgctaagtaaaataagccagacacagaaagacaaatactgcatgattgttcttaaaaggtgtatcaaaagtagtcagattcataaaatcaaaaactagaatggaaggaatctaggcagactcctaaatttggggtctgatcagctaagtggatggcaaagccagtgagaatttatccaaaagcacaaaagttgtttccttctcttcatagtctcctatgtgtctttcaggcatgaagtcatcaatatcaacctgaaaaataagcctgagtggttctttaagaaaaatccctttggtctggtgccagttctggaaaacagtcagggtcagctgatctacgagtctgccatcacctgtgagtacctggatgaagcatacccagggaagaagctgttgccggatgacccctatgagaaagcttgccagaagatgatcttagagttgttttctaaggtttgtgcataakaaatttcagctcctatttgaaaaacctgttttttaaagcgaaatcagtgctgccatttatggttcagtgatttgggagagaaaaacaaaacaggaatatgcttgtcagctctgagtgtcctgcaagtcctttcacgatccagttcctgtttacctccaaaattatcccttttcactcgtctcctgacactttatatatgccagccatactaaacttttctcagaattcccaaattcgcccctttctctttcaattcttgctgtcagattcttcccacttctcactgtgcctggttatctccacgtcatttttcacatgtctgctccgacactgctgccttttcaggagcttggcaggctggttagtgctctagcttctgagttcccatccgtgtgaacttttgcctgccttcttgcctgtgtactgcactggggctgtgagctccttgagggtgagggctgtgttttgatcactgttagttcactgcctagttttatgactggctctgctactttcttgtgactctgagcaagttacttattactttgcctctccgttcatcattggtaaaatggatatagtaattgttcccacctcataagataaaaatcagttaatataaaacacccagaacagagtctgacacatgggaactacttaattcttgtccttatagccatagcatcaagcagtgagcatctactttgtgttggcaataactcagatgactgaataaatagcaatcctgtagaagaactgtttgtaccttacttagcatcaacactgtggattagttcaaacaattagtattaacaaagaaatgactaamagatgtgtgtttagacaccaagaatagcatgtctggttatatgcctataacattgtcaccttggtagtacggtcagtatataaaggattatctttagagaaaaagatggttaaagaaatgccctaagagagagttatagggaaaacattctgttttaggagacattataaagggaagccaatgggacaggaagagtgagtcatctgcttagtaagatgagggtgaaagaatagtagaggcggctgctgtgaaagataatgtaaagggaacatgacattttcaagaacgatgtgggagagttttacaaagtagtaacaagttaaaggcatgcagcttcaagacacgaagtcatcaataccaaccaaaaaaaataagcctaagtggttcttaaagaaaaatctctttggtctggtgccagttctggaaaactttttttagtatggctggaatataaagtgtcaggagaagagataaaaggggtaactttggagaggtaaacaggaactggatcgtgaaaggacttgtaggacacgtcagagaaaatgagctttaaaagtaaagcttttagacatgaagctttactttcatgcataaagctactactttaaaaagtagtcacaagagattcattgtactatctagaaagaaaatgagatttaaaagtaatgctgaagatgcccacctttacttccctgcttgggttttaaaggagaggtggctttatgtacatatgaccctgctctcctggccacagcccatcagaacagaaatgtaccccaccccacacacctgggccagttatcttctctcctgggaacttggaaatgagacacagaactaagacagtaaaggttaggacagtaaagacaactaagcgttggggctcaaataatgttaattagaggctagaaaaaccaaagccacttaagaaataaatttttagaggagcaagaattaaaaacattgcaaagggactgaagtatgcaaagtaatatggagcagaaatgtgaggaaaaacagacgaaagaccaggcagacccaggtggaaatgtggatgaaagggctgcctgaaagccttcagtcccagtgaaggcaggctgaactgatgtggatgggatttcatgggattctatatttttacaagtgcctgtttacttaaactaggatgagtggacttctgcgtcttgcaataaaatgataccaaagaccaaagtattaaaacacataaacaccatcacgagcattaaagcatctgatgctacacccatcaagtctttaggtagtcggtcccttttgaacagtctcctggtgtcctccccaacaaagaaatcagaaaaattttcttccctagctctttgcagttggggccaagttttgtgacctaggctcttcctgtcagacacacacatagagttcaaatcagaaacgagcaaggtaaggaaacaggcttggtgggatatctgcttaagatattcagctctccactggttttcctggtgagagcagcggcagagcttctgggtttcagcagtgtgggttacaagataaaattccagagtagaaatggcatcagtgccagtggtgttagcagttatctcagactctactttctggcagcctcacaaactgaagcatctggtgctcagcttggactggcagcagtgagtgcttcccattaggccatttctcagcatgaatttgggatgttctgtcttaattccaagcctgtttgttccgcctcccaataattctatgagccactcagtctcctttaaagaaagttgtgttggccgggcgtggtggctcaagcctgtaatcccagcactttgggaggctgaggcagatggatcacctgaggtcaggagttttcagaccagcctggccaatatggtgaatccccatctctactaaaaatacaaaaattagcctggcgtggtggcgcacgcccataatctcagctactaaggaggcggagacaggagaattgcttgagcccgggcagtggaggttgcagtgagctgagatcgtgccactgcattccagcctgggtgatagagcatgactccatttcaaaaaagaaagaaagttgtttcttaaacgtgccagggtagcttctgttatttgtaatttataaaatcctgaccaagccagcattttaggccacaaaactgttcctaagaccagtccattacctctgtgagcgcaggaacttgatgcacccttggtgtttctagaayaccttgacaccaggactgtaagggttctaccatatttttatgtgagggggccgatacagttagccataaactgataaactaagaaattattctctgtctaggtgccatccttggtaggaagctttattagaagccaaaataaagaagactatgmtggcctaaaagargaatttcgtaaagaatttaccaagctagaggaggtaattatttctcctagctatcatcagrgtaaaygataactatatctaccctccttttcctcctattcttttctttatattcccactttccaagtcactttaaggtaattaggaaaattcccctaaacatttttgtttacagcagactgctgttataaagcagaaagctgtcctgcttaagatataaatcaaaacacctaaacagactttgtcatgggcttgcttttaaaatattctgctaatgttaaaataacaaggaaaaaggaaattgtacccacgtttccacaagtttttatgtatccagttttccatgcttgtttgcagtccttgtccatatatttaaaaaaaattaatatagctctaatcagagcatagatatcattctgtgtcctgctttttttcctgtgtccacttagtattacatactaaatatttcccaccagaaaaagtttgcaatgaacagtacagacacttgagggaagcccagatgtattttaccttcttttggggacagctgacatttgggccttggagtctgtctcttggccttgaaatatttcattcatgctaagcctgaagtttttactgacagaagacatagttcctgtctttcatgggaatgcattttaacattttatcagtaagcatgatgtttgctgtaggtttttcagaaacctttttttcattataaagttctcttctattactagtttgctaatttttaaaaaagtcataaatgttgaattttattgaatggtttttctgcatctgttacatctattgaaatgttcatagaattttttcctcttaatctggtgaatatggtgctattgacaaatttttttttttttaatgtttaaccatcctagcattcctaagataaaacctacttgttctctatggatttttatatgtactgtagaattagctaatgaatgatttttgtatgtgtgttcataaatgagattggcctataaattttctactcttatagtatcattattggcttttggtttcaaggatattctgacctcataaaatgagttgggtaactaacctgtttttctaatctctgaaaccatttggtagggactagcggtttctttaaaacatttgagcctggtgtctttaacaggggtagatttttcattactagtttgatttctttaatggtaattggttttttggttttatatttcttcttgaatcagtgttggtacttttatatttttctgctgaacagtgtgggagctggaaagtaagatgcagtccatattcttcagataattagtttagtagtagacagaacacagtaggtagatataagcaatctaaaatgcatattatgcattgaaaaaaaactatggaggttatttataaagggcaaattagtttggtggtttaaatagccagataatattctcaatcaccccctttggcaaaccctgtaaccaattcgccttcttaaaatttcagaaacatacaatttgtgttttgttttcaaatgattgtcatctgtttagcagttaatccagtctatttccagtatattttaagtacaaatgcttttgcacttacaatggggttacatccaataaacccaccgtaagctgaaaatatcataagtggaaaatgcatttaataaacccaacctacagagcatcatagcttagcctagcctgctttaaatgtgctcagaaaacttccattagcctgcaattaggcaaaatcatcaaacataaaaccatcaaacataaaatatttataaagtgttgaatatctcatataatttatcgaatacctgcatccaaaagatgctggcaacacagcacactttagagcattggttgtttactctcttgatggtatggctgcccagcatcaagagttatcatactgcaaatcgatagcccaggaaaagagcaaaattcaaagttcaaagtagagtttttactgaatgcttgcttttgcaccgtcgtaaagttgaaaagaatttaaattgaaccatcataagctgcagactgtgcattttatattgaaaagttaatatttttaatttttaatgcagagaagtacccaaagcataaaaacacaacacgttttcacaaagcgaacacagccatggaaccagcacccatatcaactaacaaaatactagtttgggcttttttgtactttatacaaatggactcatwtaatgttcatcttttgggtctgcctgctttcattcaatattaggtttgtgggttcatctctgctgtgtgtagttctttcctgttctttatacagtgttccaaagtatagtatattacactttacccattctactcttgatagtaaacgttttcacatttgggctattacaaatagtgctgcagtgaacattcacataacatatcttttggtgaacatgtgttacattkccaagtacaattgctgggtgatgagtatgcatactcttaaaacatggttgtaccaatttacacctctacgacagtggttccatacccttgccaacttcattttgttcattgtaggcattctcttgggtgtatagtgttattgcattttggttttaatttgcatttccctaatgactaatgcagttgaacacctttccaaatgataattggccatttggacatcatctttcttgaagatcaagtcttgctcatttttccaatgggtcgtttgctatttttcttactgattcccaggaatcctttctatattctgaataccagtcctttgtattacaaatatgttgtactctgtgacttgttttatttttcaattttccagtttatgttgttgattgttttacttcatcccagaccaacagattctaaagcttaattaagctttttgatcagaaaaaaacccaacttggatacatcggagtaaaaactgcttctctcacctgctctacttatttcccttcagcatttctagtgagtcttactacatgcacaagtaagaaatacttttatgctgtttaatgttcaggttctgactaataagaagacgaccttctttggtggcaattctatctctatgattgattacctcatctggccctggtttgaacggctggaagcaatgaagttaaatgagtaagatatttgaatattttgtgcataatttaggatgacaggtggaatagtatatattgacctttctttataacagaagttgaaatayttaatacaactggtctgaatgagaacaagcagacaggggaatcttggactatcccaggcatgtcatatacctacactaactactctccatcactgcaatggggcaggggatttctgagacatgtagtaaagtgctttaaaatttattccttccttcctgattaaaaacccataaggggaaggatatggtagcttacgcctgtaagcccagcacttcgggaggccgagacgggtggatcatctgaggtcaggagttagagaccagcctggccaatgtggtgaaaccccatctctactaaaaatacaaaaattagctgggcatggtggtacacacctgtaatctcagctactcgggaggctgaggcaggagaatcacttgaacccgggaggcagttgcagtgagctgagatcatgtcactgaactccagcctgggcaagagcaagacacttcatcaaaaaaaaaaaaaaattccataaggttgtaaatttttgtaaggatgttgttgcgggattgtacgaccagtgttacctcccatttaccgtaagatttccacattattttccaaattctgttttgagtttggcagccaccttgccttactccggcttcttggacgatagagctattcagggttacttttggtcataatctgggtgtagaataattaacatagaacattcctgattgtattccctgttcttattttaataaattgtcagtttctctctttgggcaagttctcacattaactgaacaaattgcttcactctagtctcattccttttgtgtaaaaaagggacctctayagtgtctttcaaattgaatattctattacaggcatttttaaatatttttaatgaaatatttaagggraaaaagtgaaactgtagagtaataattacatatgggagactctgtgatgtcatcctagttgacctagctcacacctttcattttttcctcttcccacaggtgtgtagaccacactccaaaactgaaactgtggatggcagccatgaagraagatcccacagtytcagccctgcttamtagtgagaaagactggcaaggtttcctagagctctacttacagaacagccctgaggcctgtgactatgggctytgaarggggcaggagtcagcaataaagctatgtctgatattttccttcactaatatgaataatagcatgcttttattttaccaaggttcaggttgcatgggatcatcttctctgactgatttgacatcaacagccaaacggtgggggtctccttaacgcccccctacagaaatgaaaatgcatttcctgtctcaggatgctgaaacgactctgagggttctatcatagtccatgctgaaaacccccaaattatcatctttagcaaaatctggacttgaatcttttttttttttttgagacggagtttcactcttgttgaccaggctggagtgcaatggcctgatctcagctcaccgcaacctccgcctcctgagttcaagcgattctcctgcctcagcctcctgagtagctgggattacaggcatgcgtcaccacgcctggctaatttttttgtattatcagtagagaaggggtttctccatgttggtcaggctggtctccaactcccgacctcaggtgatcggcgcgcctcggcctcccaaagtggcatgagccaccgtacccgtccacaatctaactttataactgctcacaggaaatacccactcagttaccctgttgtgtgatttcatgagatgctctcttgttgcttgtcttctggtttcttagttgagaagctttcaattcctccttctttcatttccatcatcaacttaatttcacattctctctattgttggccctgaagaccagacgcacattacccgaaagctgggtggctgggcagactcctatttggtctccctgtctctaaccccttcaaatccttcctatcaaatcccatgttgggcacataggtggtgtcccatttatgtaattaaatactgtgtaggctgcatcagtcaattctgcctacaaggttgatgagtaataggtaagagccccactgagaaatagaaatgccatcttccacacatttccatagcccactgggtttctcactattcaatttttattatcacatcaccaccacgagaaggtaggtcggagagcaatcatttcattctatagatgatgcaactaaggtcccgaggttaagtgaggccttaaggtgctggcagaaagatcacacccagcgcactgctcttaccattggaatcagggctgtcggtccgctccaattgtctggtttcctgaacttattttcaagttcgccattgagagaaacctccgaatgactaattcttaaatttaagggtgcataataatcacctatggctcaccgctgcatttccgattcagcaggctggggtgggtagcgaagtctgtatttcaaatgagcccctcaacccaggtgacgcaggcggtgtggggaccgcatccggagggcgacctggagccgactgacttcacaaaggcctcctgccgcaaaccttcagcggccaccaaagccccggctgccggcggcggaccacctctgctgccgcgcgcctaccggagccgcttggccctagtgctttccagcggatttcccctcaggtgcggagccgggtgccggggtcccacagccaaccactaccggttcctctttcgtcagccaccggcgccggcaggacccgcgaatcccgatctccaggagcctgtaaggaggccgcccattggctcagccgcactgctgggcaggtacttccaaagctttgaggattggctgatgctctgggcgccggggctagttggcgggtaggatcacgtgcgaggggcaggccccgtctaggccccgcctccttgctgctgctgccgccgccwatcctggtccggttgcccgagttcccggaggtctctcgcgggacctctctcaccgccaccggtgggtccgttcggcctgcgttgtattggaagggaagaggggtttgaggtcaattctgtttcctggggttttcacgaatttcggggcccacagtaggcttgccaactttaacttttgcctaacactttacgagaaatcctatttagccttggccactgttgcatcaaagaatttcacatccaacaaagtgcagcctaagaataaagaacaggtctttaaaccgcatacctttaattaaggtgttcttattttttctgatttggctggaaacaggcagagaccaccccagataaccagttctcagccttgcgtgggacaccacgagtcccacgtgtttacgtgtttaaggcactggcaagcaggggaatttggtttctgggaatgtgctgtctttgtgaaaaytgtgaaaagtcttccctgctacaytgaaataatcataaaataataatagctaatgttgaacacttactatgtatcagacacatgctaagcattcaatatttctcatccagtttctgaatgaaaccttcgcaaaccacataatgtactggtactattagctacgaattacatataagaacacccgaaagttgttgtcatttgcccaaggtcacccagctaataaatattgaagagattcgaatctagcctgaactcttacagtaagaccgttcgtgagatgaatttatatgtgctatttttccagtctctttatccaacagctctgacagaggatagtatctaccttttttttttttttttgagacggagtctcgctgttctgcccaggccggactgcagtggcgcgatctcggctcactgcaagctccgcctcccgggttcacgccattctcctgcctcagcctcccaagtagctgggactacaggcgcccgccaccgcgcccggctaattttttgtatttttagtagagacggggtttcaccgtgttagccaggatggtctcgatctcttgacctcgtgatccgcccgcctcagcctcccaaatcgctgggattacaggcgtgagccaccgcgcccggcctgtatctgcctttttgaccacaccattattcgtgggatttaacaggagttaatgagttaataatgttccttttccaaactcagtggttttgattttacaaattatttgacttttcctgatttcaggatcttgacaatttgcctttacttattcaaatgttattataccaaatatttatttaaaaagttttttttttctttgattcctcaagttgtagagagaaatagggatagggaagcagaatcaagtagttaaaaagatagcctcatttgaccctgatttcccaattgggaatatgaaatttttcctgaatataagcacatttgagaatagaaccttttacctaacgtatctcactttttgaactcattggacaataagggaacacccagtaatataatctttcatataaattaggcttctaacttattaagaggaatgtactccagtccagtttctgctactatcaagagatggcgtgacaaaaaattttgaaaagttgccgaatgcaaaccacagttcctcttctcaaaacaaatgcatgtaaatagagtgtaagctatttctttggtggcattattttcctagaaggcttaagtcgttaatcacccatgaccgaagatccaaacattttcaaagcagatccgatcatatttcaggtggctgaaaatggatttggagtaggtttaatatggtctacttacaatttgtttcatgattgagtgggtcagtataataaaggtataaacatgaaataacatagaaggaaagtttgcaaagaggatttcaaagaagtacctgttgggtattcaaaagaaagtagggataagcttaaggttaaaatctttctagggaaagtatagtgttcagaggtaagattaaaaaccacattactgaaatggagtctgcagcattcagcccattcaattggcattaaactggtaactggtgaaataagtrttgtgagttgaactttaattctaatatgcttggcaaagccgaatcacagtgtgcttcatctttgtggatacaaaattggaatgcactctgctatttaaaatgtgttcttactcactagcgtttgtcattaactttgacgtatactgagctcttactatactgacgatgccctggactatttgattcgatactcacaattcataaagtaggtattattggtgttctcattttgcaggtgaggaaagtgaaatccaaaaaggttagatagcttgcctaagtgccaaagctgggtctcaaaaagtcagcccattgggctccagggcctgttctgagaaccttgacactagattgtttccctttagaggagaacagcttccatccctgtcttctaactctaccaaattaacttggcatttcagaacttgatttcccacatacagatacacttttcatgaacatttcccaactctcagagttagtttcttttaaaaggtgggaatgaaaaaacaaaacttggaaaatcatcctcttctggcaaagtagaaaggtggatccaggaaccttttaatttacaaatggaattcccagtttggccattatccagagaccatggatgggcaaattaaggccattgggctaaatccaaccaattgttggtttttttatagctcaatatctaagaatgattttttacatttttaaagggttgaaaaagaaaaaccagtcacaacgtgatatgtgaaaattatatgaaattcaccaagagtgagccctaatatattaactatggatgttgggtgataatatgtcaatgtgggttcattgattgtaataaatgtacctctctgattggaatattgatagtggaagagactgtgcatgtgcgggggcacagggtatatgggaaatgtgtattttctgctcaattttgctgtgaatctaaaacttttttttaaaaaaaggctattaaaatacatatatgcagttcaaattcagtgtgtccataaatacagccacacccatttgtttatttatcatcgatggctgtttttacactacaagtgtagaactaaatagtggagaccagatggcctgaaaagcctgaaatatttaatatatgtaaaaacatttgccaatcattcagttcatggcatctgataaagactaagatactggttgagattgttgccgctggagtcaaacttccagggttcctagtcctccctctttcacttactagttgagaagtgcttaactatgctagtctcagtttactcatcttttaaagtgaatcaaaatagaacagttatgggacttttttttttttttttttttttttttttgagacggagtctcgctctgtcgcccaggctggagtgcagtggcgcagtctcggctcacagcaagctccgcctcccgggttcacgccgttctcctgcctcagcctcctgagtagctgggactacaggcgcctgccaccgcgcccggctaatttttgtgtttttagtagagacggggtttcaccacgttagccaggatggcctcaatctcctgacctcgtgatccgcccgcctcggcctcccaaagtgctgggattacaggcatgagccaccgcacccggcccagttattggactattttaagaattaactgggtcaatacacatgaagcaccaaatatatattagtaataatttattttgattttgagattttgcaaccctcttatggccttttttaggctatggatatatttttctcaactatcttgaaatctgctttttttatatgagggatgcatgtgtatgcccagaagtcatcttacctaccaggagctctaagatgacatggttgtgtttcttgcttctattttaccatccaatttgtccttcttgatcagaattagctccaaagtagtagaagttactctgttactttctctgtcttcttaaatgaaaagttgtcagcgtagcaagccgggaaccaatatgtcttctccaacaccagatttcttgctgacatatatgcattttattttcagagaacatttattcaaacatttttgccattccctgattcttataaaatgttaatactttccatattattatctaagcttatttcacatgaaatcattgaatgacagcaaaaaatgtagttgagtcactattctgaagatttgcaaagattc

SEQ ID NO: 94991 - DNA, 117340 bp, Homo sapiens
  misc_feature (1)...(117340): n = A,T,C or G
cccaggcaggagtgcgtggcatgatctcagctcactgccacctccacctcccagatttaagccattcttgtgcctcagcctccctagtagctgggattactgcatgcacccagctaatttttgtatttttagtagagatagggttttgccatattggccaggcttgtctcaaactcctggcctcaagtgatctgcctgcctcagcctcccaaagtgctgcaattacaggcatgagccacagtgcccagccaaaacttcattcctttttatggccgaataatattccattgtatgtatataccatgtcttgtttatccattcatgtgttgatggacacttgggttgtttccatcttttgggcattgtgaaaatggtgatacgaatatttgtgtacaagtatccgtttgagtgcctatttttaattattttgggtatctacctagcagcagaattgctgagtcatttgtttaattttttcgaggaatgacaacaatgcacgagggttcaaatttctccatatccttgccaacacatgttattttccattaaaaaaactatatccacgcgtatgaagtgtatgtatttgattctaactctcctatatcctcgagaatccatctcttctgaaactctgaagatctttggggtcactaatctggcatgaggcttacaatgacctgccttcattttttacccaagtgtctgatttccttaatagatgttcagcaactttggaacaaggtgtgggtgggggatcaatttgaatctccagtgtctactatctggtagatgttcaacaaataaaataattgcgataaaggtcgcagatcttgtctctctcacactgtagacacccagtggaagtttccaaaaggcatctgagagatttttgcttaattcaaatgaattaattttcatgactatgtgaggcagttagttgttggttacatttaaactgctaatctgatccctgccactctgcttgatgcccttcagttactctccattgcacttaaggttggggcccctgttcattaacgtggtctgcagtgccctgccaggtctgaccttgcctccctccagggctttctccctttttctttaggcttgggttattccttagatacacaagactcatctctagcaccagctgttttctctttcactcttgcaaacaagttccccctcacttttgcctccctcactcccttccttccttcctctccctctctttattcctctctttctctctctctttctttccttttttgaaacagggtgttgttctgtcactcaggcaggagtgcagtggtccggtcatagctcactgaaacctcaaactcctgggctcaagtgaccctcctgcttcagcctcccaagtagctaggactataggtatgtgccaccatgctgggctaattaaaaaaaattttttttttgtagagatggggtcttgctacgttgtccaggctggtcttaaactcctgggctcaagcgatcctcctgtctcaacctcccaaagtgctgggattacaggtatgagccactgcacccggccctctcactttttcacctgagtcctactcacccttcagatctcagctgagatgtcatttcctcagggaactgtttcctgaccctcacccgatcctaactctaaactccattttgttctccctcatagcatcttttacttttcctgcatagcacttatcaaaattgtagtaaagcaactttttgtttatttagcgttcatcttccaagtagtcagcagtctccatgagggcagcaactcatgtctgtatccgtcagtgttaggcacatagtaggcactcaatgcgtagttttgaggagagcttctaccaagaagcagaaaaactgatgagtggcttgtgaatgctgctgatattctgggtgactcagagtttctgggtattctggggaaaacagtgtaggtcagattggataggacagtcacatgagtgcctggcaggaagttgatgagaggccatccaaggccacagtggggtggcctcttttgccaagcagtgcccaggctcttcagctaatgtcaggttagagacctcaagcaagctctttatggttcctcagcctcccagccctttgttagaaggttgtttcatgagttggcatggcttttcttacccttgaaagtcatgaggcaaaattgttctatccttttgcatttaaaagaattaattttttgttacaaaagcaatacatgattacacttatcttccaaaacattaaaaggaaagccaatactccctttgaacattctctcaataaaataatggtcctttatccctagcttagagagaacttctgatatattttgggcatgtagctttacagacctgttttaaaaatctttcataaacctaatgtatgataatagggaataatggtattatttatgtgtgttctgttttagctttttattttgaaataattttagatttacagaggagttgcagagctagtatagaaagtttcaacatacacttcacccagcttctcttaatgttaacaatttatgtaaccctggttcaaaactaagaaattaacagtagcacaatactaataacagaactacagaccttattccagttcagaccttattccagtttcaccagttttttcactaatgtcctttttgtgttccaggataccacattgcgtttagttatcagatctctttagtctcctatctgtgaatacgacaatctctgacagtttctcagtctttccttgactttcacaaccttgacaattttgaagattacacatcaagtattttgtagaatattccctcaatttgggtttatttgatgttttttcatgattaactgaagttttgcattgggggaataattttttaaatattgatactatccatctatctatatataatagatagatatagataaataattctgcaacttcctattttcattcaaaaatatgactaagatatatccatgttgattcatgcagatcagagtcacttcttttattttttattattattatttttggagacagggtctttctctgtcacccaggcttgagtgcagtggcacgatcacagcttactgcggccttgacctcctgggctcaagtgatcctcccacctcagcctcctgagtagcagttgcaactacatgctggagccaccacgcccggctgatttttaaaaactgtttgtagaaatgaggtctcactatgttgcccatgcttcatttaaattctctatagaattttattatataaatattctacattttagttagccaccccccattggtgggcatttagctgattctaaattttctttctctctctctttttttttttttaaagacaaagtttcactctgtcacccaggctggaatgcagtggtgcaatctcggctcactgcaacctctgcctcctgggttcaggcgattctcctgcctcagcctcctgagtagctgagattacaggtgtgcgccaccacacctggctaatttttgtatttttagtagagacaaggtttcaccatattggtcagactggtcttgaactcctgacctcatgatatgccagccttggcctcccaaagtgctgagattacatatcaattctttttttttttttttttttttttttttttgagacggagtctcgctctgtcgcccaggctggagtgcagtggcgggatctcggctcagtgcaagctccgcctcccgggttcacgccattctcctgcctcagcctcctgagtagctgggactataggcgcctgccaccacgtccagctaattttttgtgtttttagtagagacagggtttcaccacgttagccaggatggtctcaatctcctgacctcgtgatctgcccgcctcggcctcccaaagggctgggattacaggcgtgagccaccgcgcccggcctcattctttttattattgatttgttaagagtcctttatagacaaatcctttgtcttttgtgtattgcgaatagttttccccttattctgttatcttttaactttgttttcagtttttttcaagttattccatctctctgattttttaaattcttttttctgatttattttttaaaacaaagttcttgattataaaagtaatacaaacaccgtaagaaattaatacaaaagtacaaagaagaaaccaccccatcttatcactgagagaaaacaacataatcaattacatatttccctgtagtcttttgtgtgtgcagttttttttcacagttgtgatcacattcatttgtgtgtgtctctatatttgtttttctctcagtaccatagtgtttagacacaaaccctggccttttttcgtttcttctttttttttttttttggagatggagtctccctctgtcgcccaggctggagttcagtggcgtgatcttggctcactgcaacctccgccttccgggttcaagcgattctcctgcctcagcctcccgagtagctgggactacaggtgcgtgccaccatgcccagctaatttttgtatttttagtagagatggggtttcgccatgttggtcaggctggtcttgaactcctgacctcaaatgatccacctgccttggcttcccaaagtgatgggattacaggtgtgagctaccacgccccgccaccctggccttttttcaaatgcacttggtttaaagattgtgttatgccagcttccaacccctattcctcttttccatatatcctgagaaatttagaaggtgaggggcccaaggtctatccttagctgacctgaagcgaagttggctgagaagcacaagaaggagtagaagtgctctggcggagcacttattaaaaagacgcggaggttttggttgactgcaagcccaatatgagtcaacagtatgggtgccaagaactttatcgcaggagtgcaaagcgataggtcccaaaaggaggaagctatagtcctgctttgctctgatgataccacaaacatttggttcagtcttgggtgatgtattctaaagaaatcacagtcaaatctaccatttgcgtgagagggataaagaccctcaaaaccagggcagaggaggaacaatggaaggaacgggagacactgatgtggaatgagaagaccttgggcagaggtgatagaagtaaagtatctgaaaagtcaaaggtccaggagagattagacgtttgttctctgtggctccaaggcatcgaatttcggccctgagagtggaagtttagacacattttctcactggtgagagctgctcggaccaaggaattcagtcctctggaaatagctagctgcttttgcggagtcttcctgctgagttgctggtggtggggtgaacatttattgagtgcttactgtgtgccaggatcctgctgagggcctcacctatattgtgtgatttcatcccgtcaacaccctttgatgtggggactgttgttccctatcctggtgctacaaatgtgggcaccgggtataggaggtcaggtacctcgcccgaggttacagtttgtaagtggtggtactgggactggaactcgttctgacaaacttcaaagctggtgtttttagccatcaaggggattcgagggtgccatgggggtgtggacgcatgaggggccttgaggtccattagaccaaaacattctgtgactgggaaaaaggatgccctctcctcccaaggaaaagcttcttctgaatgagacacagtggagaggttagcccagggccaggctgaggggcgcaggcagaatgccaagggatggagaccctcagaagggcaaagccggtgttccatcgtttgaagatctccagacccgcgggacagacagacgcagcgcggtcagggagcgtcggcttcgccgaactctgcggcggagctgggggacggaacagcgcgccggtccctggccgggcgcgagcagaggggcggcgcggggcggtgccgggcggcgggggcggggagggcgcgcgtygaggcggctgcggcagttgcgcgctgggattgttgcsgtgcgctggagccggtgagtgcggcgggccccgtgggcgggcggggaaggagcgggcgaacggggagctaggtggggaggtgcgcggccgaacacgcgaccccagggtagcggccgccgcctgcccccgcccccggcccccagggaccatggccccaaggcccctctccttaggccgagtccccgccagcgcgctcgcggacgccgcacgcctcccaactccctcggtgcggcccccgccccacggcagccccttcctccgcgccgccgcgacgcctccggcccacgtcacgctcgcgccattgtttcccagccgccggctcgctgggaccccgcctcagcctcccagcgcggccgttcgccgcgttccgccctcttccccmctttcctcacgctggtggtagccctttcctcagtcctgctgacgtcctccagctgattccaggctgttcccggccacccctgaggccgtcttttcgcttcttgtaaaagcctccccgcccccagagctcctcggtcgcctcccgagaagccaaggggcctctggtggagcgccaggttgacagcgttttagcaggaccgcgagaaacggccagctcgtttgccacacgcccgtgtgcaacacttcctggaaaggtcacagcgaattgcaagccgccacaaaaaacatccggacagctcctggtcagggggctgagccgttcagtggcggcctattcttctccttttttcggggctcctgaaatcggagagggcgagatgccgatctgaggcctgaacccttagtttaagaaaaacgttttgggggtttgactccggcaggccacagcttctaaaagcagcaggtagaggctgctgtccgaatcgacgttttcctgggctttcacctttagggccttgatgtttgaggggggtcgtgctctgaagtacagcgccccgaaatgactagtcaccattacaggggggtgtgtgcgcgcccgtccaggggccgatgagttcttcaggattgagctgtacttggttcccagtgtctgtagactattcatttcgcctcttcaagcaacgaatgcaaactactgaccataatgtgaaagggagaatattgaaactgtgtcatttaccatgaaaacttagtgttattgcgtagagaaggctttaggtttcaaaaatatttaccacatggcttttcaacaacggttagaatttatccagatgaagacatccaggcctgaaagggtgaagttcgaaaagagaaaaaaaataggtgtgagctgagagtggaaaaaaaaaaaagaacaaaaaaggttaagttcaagaaaacatagctggttagtaattaaaataaaaactccacatgcagggttgatactagcatacacagacttatttctgaagtgcatttccattgcagtgtaaaccactacatttcaacagtataggtagctgcattactctcattgacccagaattaaggttttaggatttagtaaccaacaaatctgtaaaataaggtggaggggcgcggggtggagtgggggggttctgaaggagatgttatgcaagattcctttcagttcaaaggtttgatgccattgtatgaaaatttaccatcagctacaagttttcagaagtttgtaattgtaagaagatttatatagatagtattcccttatagtacctgccacccttaaccagaagacatcacatcttcctaaagaaagccagattacaatagaatgttaggcacagaggtgctcattaatctttctctaggctatttctcctgttttatggggaaagaggagtacataaaacacaggtttttttttttaagtatttcctctctctctcttttttttttttttttgagacggagctttgctcttgttggccaggctggagtgcaatggcatgatcttggctcattgcaacctccacctcccgggttcaagcagttctcctgcctcggcctcccgagtagctgggattacaggcatgcgccaccacgcctggctaattttgtagagacggggtttctccaagttggtcaggctggtctcgaactcctgacctcaggtgatctgcccgcctcggcctcccaagtactgggattacaggcttgagccactgcgtccgaccctgttgcttaattctcttaccaaaagcttaattcagtgaaatagtaaataacaacaaatccccaaaaacaaaaacccacaactttgtcatgttatgactgtgctcttttaaagtacttacatagactggtttttatctagtacacttgctgtgtacatattatttgggattttgctcttaccaatatttctgggatgtccatgtatttagagaattcatctaatcttcattagtagatgctctctaatgtgccccggtagtcaacaatgcctggcacacaggctcttagtaaatttttgttgaataagtgttgtaatgttttgaggtttttagacatttaacacaaaatactaactatcacaaggcatatgttgagtgacgtgagcagtaaaggcagtcatactttcagccaggagacattgcatttatttaagggcccggattttgtagtctggcttgctacttaacatcatgcaacctcggggaactcagttaaccttagacaagctcactcagtttctctcaccttgagaagggaaaaatagaacaaattttacagagttatgtggattaaatagaataattcagttgaagtgatactggcacacattaagttctctataaatgttagttttttttgctcagagtgaaggaatattaatgtagcttgrtgggatcaggaaaaacagtaacacttcagagtagggagaagatgctgaagtggatgtattgagggtatgattaatagattgttctcactaaaagggtttggtagagcagtagtctgagataaaactggaaagagaaattctggtaagcagtttacaagtatgctacatggattctttgcaattagagcggagtgaatgaccacctgaggtcaggagtttgagaccagcctggccaacatggtgaaaccccatctctactaaaaatacaaaaattaatcaggcgtggtagcgcatgcctgtaatcccagctacttgggaggctgaggcaggagaatcgcttgaacccaggaggcggaggttgcagtgagctgagattgcgccacgcactccagcctgggtgacaagagtgaaactcygtctcaaaaaaaaaaaaaaaaagaaagaaagccacaaaattaatgcggcaaaccggccaggtgcggtggcttacgcctgtaatcccagcactttgggaggtcgaggcaggtggatcacctgaggtcaggagttcgagaccagcctggccaacatggtgaaaccccgtctctactaaaaatataaaaaattagctgggcgtgatggcgcccacctgtagtcccagctactcaggaggctgagacacgagaatcgcttgaacctgggaggcagaggttgcagtgagcctatatcgtgccactgcactccagcttgggcgacagagcatctcaaaaaaaaaaaattcagtaaacagtaaaagaaaaaagttaaaaaaattatgacagtcttaatctttgttttttttttcgtttttttttttgagatggagtctcgctctgtcgccaggctgtagtgcagtggtgcgatctcggctcactgcagcctccgcttcctgggttcaagcgattctcctgcctcagcctaccgagtagctaggactaaaggcgtgtgccaccacgcccagctaatttttgtatttttagtagagatggggtttcaccatgttggccaggatggtctcaatctctttacctcatgatccgtccgccttggcctcccaaagtgytgcgattacaggcgtgagctaccacgcccggcccttaattttaattgttaaaatttgataaagaaggtgggtagtagacatatcaaatgatcattatattattttctgtgtgtttgaaatatttcacagtattttaagatgaacctaaaataaaacattaaagaaactccattaaactaatgagcctataaaaatatatatcccactgggcatctgtaatgaaaacatgctaatactcagcaagcttactgatttttttttttaagccgttaaatttcaggcatcagatttcagtcttctctttccaagcacaagcaggctctttcatcccacactctttttttttttccgagacggagtctcactttgttgcccaggctggctcgatctcagctcrctgcaacctctacctcctgggttcaagcaattctcctgcctctgcctcccgagtactacaggcatgctgagaatacaggcatgtgacactgtgcccggctaatttttgtgttttcggtagagatggggtttcaccatgttggccaggctggtttcaaactcctgacctcaggtgacctgcccacctcagcctcccgaagtgctgggattataggcataagccactgcgcccagcccaaattcgtatgttatacagaattttctgatttataaatgtgggcaactgatcgtaaaaaattgtaaaaaacactgtgacctctacagaatctggacccataaatctgtttctacatctggaagggaacttgagagtcttccacgttcaatgccttcatttgacagatggggaaagtgaatcccaaaatgttttgcattttttgtcttttatgcaagaaagtcttccctacctttgatccgtaaggctgttcatctctatattcttctgtaaattgtatggttttgctttttcacatttaggtttattgacagtgcgtatttttttctgcttagtttatctttattttttatttatttattcatttttgatttttgcactgtcgcctgggctggagtgcaatggcgtgatctctgcttactgcaacttccacctcctgggttcaagtgattcgtctggctcagcctcccgagtagctgggattacaggcgcccgccaccatgcctggctaatttttttgtatttttagtggagatgggggtttcgctatgttggccaggctggtctcgaactcctgacctcgtgatccacctgcctcggcctcccaaagcattgggattacaggcgtgagccaccgcgtccgccctattttatctttaatatgatcagctagtatttgtgttacatattctttttctaccattatgtttgtcataaaattatgctctataaattcataaggacaggacatgcttttgttatgctctgattttgggtcagaatattgtagaaaatgaaatttttgaattcattttagtgtaaatattttacagatttctgctcttctacattattttgtctcatttgcctttaaagatgagtagtacatgtatttgactatccttgaaaaatattttgcacactttttatagcagtcatattagaatctagttaggcatttgtgtatctctatctagtttgtttsagagctgctaagtaaaccagctagaataatagtgtgtagattgaaatagctcaaacattctgtatcaaaattataagaattttaagttattttaataagcatttaacagtatcatgctgtgtaaataagaccaagctgtggcttggagagtaaacattaaaagtttttttttttttttttttttaagatggattctcactctgccccccaggctgaagtgcattggtgcagtctcagctcactgcaacctctgcctcccgggttcaagcaattctctgccttaatctcccgagtagctgggattacaggcgcccaccactacacctggctaattttttattttattttatttttagtagagatggagtttcttcattttggccaagctggtcttgaactcctgaccttgtaatctacccgcctcagcctcccaaagtgctgggattacagatgtgagccactgcaactggccttttttatttttttaaggtggagtctctctgtgttgcccaagctggagtgtagaggtgcgctctcagcgtactgcaacttccgcctgctgggtttaagcgattctcctgcctcagcctccctagtagctgggattacaggtatgcgccaccatgcctagctaatttttgtatttttagtagagacaggttttgccctgttggccaggctggtcttgaactcctgacctcaggtgatccgcccacctcagcctcccagagtgctgggattataggcgtgaaccaccgcccctggcctaacattagaatctttcacaaatctggtcagtaaatgccttttttttttttttttgagacggagtcttgctctgtcacccaggctggagtgcagtggctccatgtcagctcactgcagcctccatctcccgggttcaagctgttcctctgcctcagcctccctagtgctgggattacaggcatgtgccaccacgcctggctatttttttgtatttttagtagagacggggtttcactgtgttagccaggatggtctcgatctctgtaccttgtgatccgcccgcctcggcctcccaaagtgctgggattacaggcatgagccaccgcacccagccagtaaatgccatttttttaagccttgaattactcgtttacttttgaagtaggtttggtgaaataaatcttgaattaattctctctaggtctgagagcttccaggaagaaaggaaacaaacctatagctatagttgtccttatatttaggatactttaattgacgtgataaatgtgtgaaattgttacagcctctgatacgtaatggacgctatgaggttttgactccaaaagtagaagcctattactcattcctgcaaacatcaagtactgtattgtgctaaggcttcaagtattcaaacatcttgcactcaagcattataaacagtttatattgaccaatttccatgtctcagccactgttcttagcaccttacatccttgttccaactctacctgttttgcaatggaagaaactgtagtgcttataatttgcttagtcgtagagctagttggtgttagagccaggttttgaacgcaggcagtgtggctccagaatccgtactcttaaccacagtataattctgtgacttcaaattatctaacttctctttcctgtttacttcttcgtaaaatgaggataatagtacctaacatatagggttgttctgaaaagtcagtgagttaaaatatgtactatactgcttagaatcatacatgaaaaatagtaagtactcaataaatgtcagctgttattatgttagcattattaaggcatcgaactcatgcatatctctgaattttaaccaaataggtggactaaaccttaagtatgaatttatatattaaaaggtagaaatactgtggtctgtggttatttatgcctttccgattttatctttttaaattattttgtaacaggaaaaataagagctaaaccaaagttgaatggtgagcaggagttcattggtaagagaatgagttctttyctgaaataaagcagttttttacctgcttttttttttttttccttttttttttttttggagacagggtctttgtctgttgtccaggctggagtgtgcagtggtgcgatcttggctcacgcaatctctgccttcccggctcaagcaatcttcctacctcagcctcccgagtagctgggtctacaggcacccgtcaccatgcctgtctaatttttgcatgtttttatagagatgggggttttgccatgttgcytaggctggtctcgaactcctaggctcaagggatccgcctggcttggcctcccagagtggtgggattataggtgtgagccactgcaccttgccctatgtatttttttttttttaaaggagtattcaggagtcattactaaaggtgcaaagtattatatatcgtctgaatgtaaaaattgtacagctkgtttatacctttatgcttttgaagacctcagttaattatggcaacgttttgaagaaatagctcagtcttttaaaatgttttccttacatgctctcttgttcctttgtgtcaataaccatgttattgttgaaggtccggtattattcaaaacattcagttagaagcagccttaatgtgttgatgtagaacaaatatatagcattctatgtgatatggcaggatagtagcaatagaatgttgatgagaacatagcaaaattmgtcttttttgtatattttcaaaastttaggaacagatgaaataaattygtagtttctagttacaatttcagactacagataggagcatgtagctgcttgaagaagaaaaacaaattgtcaaggcaacaggtactgcatttctcactcgacaagttctctcttctcaactttgttatttttccttcggagaacaaggaagcttttgttccgaggcctgatgttgaaatgttagcaaaatattatgttaatcaagccaagaatcttatgtatttgtgaaccaagaataagatttcacaaagattcatttagagtattaaaagggacttctgcagttattcttgcattttcaggcttacacaaaaataggcttctgaaaagcaaagggctccatgtgtagacgtttaatggttcatttatttctgtctgttaagtctactgtgcgagatgctggggatacagcagcaaataaaacactcctctcccttatggagcttatattttggagagattgacagaatgcaaactgtcaaatgtaagggttatgtgcaaaaaacaagtaaagcagggtaagaggacagtgagtgatgtgtgtgggtaagtgtgatgttattagttggagtttgttaactgttggcatcactttggtgtgtgaactattgagtgttggcctttgacaggaatgtgtagtgcagtttgggacaagtgacataaagaactctgaatgaaaataatgaaatgaaaaataaacaaaaaaacttgtttatagrctgggcayggtggctcattcctgtaattccagcactttgggaggcaggtggatcacttgaggtcaggaattcgagaccagcctaaccaacacggtgaaaccccgtctgtactaaaaatacaaaattagccgggcgtggtggctcatgcctgtaatcccagctacttgggaggctgacgcaggagaatcgcttgaatctgggaggcggaggttgcattgagccgagatcgcgtcattgcactccagcctgggcaacaagagtgaaactctgtctcaaaaaaactaaaaaaaaaaaaaaccaaaaacttatcatgaactatttaaaagatgagaggtaatgaaacatttaagataatttaaatgcaacagtttcaaggagccttctggaaaaataggcatttcttcatcttaaactattttattttttaatttttatagatttagggggtacagttttggatatatagcatagcagtggtctggctttttagtgtaaccatcacctgaatagtgtacattgtactcatcaggtaatttctcatccctcaccctcctcccacccccacttaaagtatatatatatgtgtgtgtgtatgtgtgtatgtatatgtatatatatatatatggcgtgaacccaggaggcagagcttgcagtgagctgagatggtgccactgtactccagcctggaagacagagcgaaagagacttcgtctttaaaaaaaaaaaaaaaaaaaagcatttgtttaattatttttgcagtagaagaaaagaaaggaagaatgatgcagaggcaatattgagagggatttggggcaggaatttttcaaaattcattagagttattaaagaacagtttaaaactagtaattccaagaaggagggatagattgttaaaaaaaaaaaaaaaaagctaataatttcaggaaagaggggagggaaggagtgtgtgatatatatatatatatatatatatatatatatcacacacacacatatatatatatctcctttcatgtgttttgtgatgataaggagtaaaggttacaaaatacttaaaaaagctatagcttatttcacagtgctattctttgagttataggtgacactgttaactacaaatatgaggatttagtttttcagcagtactggtagatgaattaaagtaaacttgcatctgactttccatgtttttaaggggatgtatttgtaagtaagttggtctgtggctatgttacagagaggcccttaagcacaatataatgataaaaccaaatgtctaactactataggttattgattttacttgcttatctgccaaggactagggttatcaaagactgaataaaatgtggctatttagtacaatatgaggcatacaaatggaggatatagctttaacttttgtttttccataaactagtttaacatgagtaatatgcagtgaaagttgttgtatttagagaccaaaataagtttcaggctggtgagaaaatttgaagaaattattcaaaattatcctttccatgtaagttttagggcagtgttcttagaatgagaatgaatggttgattataaaacttaaaaatgccaagtttagttttttttttttgagatggagtcttgctctgtcacccaggctagagtacagtggcgggatctcggctcactgcaagctctgcctcctgggttcaagtgattctcctgcctcaccctcccaagttgctgggattatgggtgcctgccaccacgcctggctactttttatatttttagtagacagggtttcaccatgttggccaggctggtcttgaactcctgacctcagatgatccacccgcctcggcttcccaaagtgctgggattacaggtgtgagccacccaggttttgtattttaaatacaaaattaaaatttgagtgaagtagaaactactgattattcatactgctattattaccctattatctatgttgacatacttattccattgaaaaatgaatatttgattcaaattgccatgtgttaaacactgcctgatagacctgctctacatattgttaaagtgctcctcactttattccaaatgaattactgacctgacttgaaacagacatgtaaaatgactttttaaagagcgtttgccaatgtataactctagcagcgtggcattttgtcttaatgcagaattgtcatgaaaagaagtgctgactgctattttttctttttttttttttttgagatagagtctcgctctgttgcccaggctggagtgcagtggcgcagtctcagctcacttcaacctccgcctcccgggtgggagaagcaattctcctgcctcagcttctcgagtagctgggactacagggatacgccaccacgcctggctgatttttttccgtttttagtagagacaaggtttcatcatgttggccaggctggtctcgaactcctgacctcaaatgatccacccaccttggcctcccaaagtgccaggattacaggcgtgagccaccacgccaggcctttactgctatttttatacttttatcagtttgggcgtgaagaatattactgtactacatcataattcttgaacttttcttaacattatgttaagtaatgaggtaattatgggagggacaaaatttcctttcattgtagtttaaagatagtggtcttactatatgtggctatcagcattttattggcacaccattttgaaggaaagaatattcagtgcagattgctaaccaggcttaccctacagtttcagttgctctttgcttcctgttttcagcagttgcctagagctgttggagcagctgttttcctttctttgggggagggtgatggtagtggtgaaggggactgtgcatgttttgcctgtgaawtattwttttttttttttttgagacagagtttcgctctgctgcccaggctggagtacagtgatgtgatctcctgacgtcaagtgatccattcgcctcggcctcccaaagttctgggattacaagtgtgagccactgccactggctgaaaaagtcttattgtggcataattggtatacaataagttgcacagagtatataataaattttaacatatatatatgtacccatgaaaccatcaccataatgaagatattgaacgtatcaccccttctccccaaaagttttcctgggctcctttgtaatacctcctcctctccgtacttgacctccttaccccagggaaccactggtctgtgttctgtcagattagtgtgcattttctaggattttatatatacggaatcatacactatgtactctttttgtcttctttcactcagtgtagttattacgaattttttaatgttttgcatgtaaatactttattcctttatattgcatagtagtattacattgtacagatgtaccataattttttttatccatttacttgtggataacatttgggttgtttgtagtttctggccattacaaagctgctaagaacatttgtgtataagtttttttttttcttttgagacaggatctctgtcgcccaggctggagtgcagtggcacgagacaatcttggctcactgtagcctcaacctcttgggctcgtgtgatcctcccaagtagctgggactacaggcatgtgctaccatgcccaactaatttttcaattttcgtaaagactgcattttgccatgttgcccaggctgctcttgaactcctgggttcaagcaatccacccatcttggcctcccaaagtgttgggattagaggtgtgagccactgtgcccaagcctgtgttcaagtctttatatggatatgtgctttaatttctcttggacaattacttacaattagaaagtctgggacatatgatagatatatgtttaagttttaaagaaatggcaaacttttccagagtgcttgtgccttttttattttctttccagcagtgtagtagaattcaggttgctctacattctcaacaacatttgatactgtctttttaattttaaatattcaaataggcatattttggtatcttaytgtgtttttaatttgtatttccctagtgacaaatgatgttaaacatcacttcatatgcttatttgccatttgtatatattctttgatgaaatgtctatgcatatgttttgcctgtattttaattggattatttagcttattattgcattttgagagctcttcctatattctggatacaagtccttttgtcagatgtgtgtttgcaaatattttgtcccaaaccatagcttgtctttttcctctcaatactctaatggaaggataatatataaatgcaattttgttttagttttttaagtcctctgttagccatgaagagggacttaaattaagtatacaaacaaggttgcagagataatctaaccttctaagagaataaaatattctaaatcttttgcatatgcatataaaccataatatgcaaaacagattaatatgatgttatatgccaaccctgtagtaggttggtttattgtttgttttatttttttgtttagagattgggtctcactctgtcacccaggctgaagtgcagtggtgtgattatagctcactgcagcctcaaactcctgggctcaaagcgatcctcctgtctcagcctcccaagtagctgggagtatagttgcaaaccactgtgttactaaatacaaaaaattagccgggcatggtggygtgcacctgtaatcccagctacttgggtgcagttgttgtttgtgtatatgcagttgctgtttgttttattttgtatatcactcctttactttactcaggtytctgaacaaatattacctcctcaaagaggccttccatggttttcctacctacagtattgttactggaaaggggtcctgatccagaccccaagagagggttcttggatctgatgtaataaagaatttagggcgagtccataaagtaaagtgaaagcaagtttattaaggaagtagaggaggctgggcacagtggctcacacctgtaatcccagcactttggaaggccaaggtgggcagatcatgaggtcaggagtttggcaccagcctgaccaacatggtgaaactccgtctgtactaaaaatacaaaaattagccgggcaaggtggtgcgtgcctgtaatcccagttactcaggaggctgaggcaggagaatcgcttgaacctgggaggtggaggttgcagtgagccaagatcgcatcactgcactccagcctgggtgacagagcaagactctatctcaaaaaaaaaaaagaaaaaaagaaaaaagaaaacgtagaggaatacagagaaaacgtagaggaaacagaggaatgaccactctgtttacagagcaaccccaagggttgcttgcttgtcttttttttttttttttgagacagtcttgatcttgttgcccaggctggagtgtagtggtgtgatctcggctcagctcattgcaacctccacctcccaggtgaaagcgattctcctgcgtcagccacctgagtagctgggattacagatgcgtgccaccatgcccagctaattttttgtatttagtagagacggggtttcaccatgatggccaagatggtctccatctcttgacctcgtgatccaccctccttagcctcccaaagtgctgggattacaggcatgagccacaggtcttcctctgtcactgaggctggagcgcagtggcataatcagctcactgcaagctctgcttcaacctccgcctcactgcaacctctgctgggctcaagtgatactcctgcctcagcctcccaagtagctgggactacagatacggaccaccatgcccaactaatttttgtatattttgtagagatgggtttttgccatgttgcccaggctttcaaactcttgagctcaagtgatccacccactttggcctcccaaagtgatgggattataggcatgagccactgcgcctggtctgtgtacaagttttatagttttagatattacgtttaggtctatgatccatcttaaattttgtatatgatgagacgtgtggattaagttcacttttccacaaaaggagagccagttgcgcctgcacagtggattattattcagtcattagaaagaatgaaatgtgatatgtgatactacatggatgagctttgaaaatactatgccaactgaaagaaggcagacacaaaaggtcacatgttgtatgattccatttatatgaaatatccaggatagttaaatccagagacagagtccagattggttgttgccaggggctgggtagagggcatagtgggaagaaactgcttaatggatgaggggttttactttagagtcatggaagtattttgacactaaaaggagttggtggttgcactaaatgccaccaacttgttcactttaaagtggccaattttatgtgaatttcccctgaataaattatttttttaaaagccacagaggtgatttatataaaaaagacttagcctggacaacataatgagaccctgtctgtacacaaattaaaaaaaataataattagctgggttttgtagtgagtacctgtatttctagctgttctggagcctgaggtggaaggatcacttgagtccaggagttcagggttacagtgagctatgatcatgtcactgcactccagcctgggcaacagtgagaccctgtctcagaagaagggagagaggaagggaggtatatattgacttcatgtcataaacgatgttagcattttcaagatgggaaataacaggctacagatgttttcacaaataatgctatttttataaaatattaatctactacttaactctaagaggatatttttcatccttatttgaaactacttactgatgaaaacttcaaaaasagaagtgaaacctaagaatagcctaatgtaaaagtagttaaaaacacttaagctgcccacctcattttagatgcttatcctaattagatggaatgttttagtttattccttctttttgttcatagtctttattgccagctgaaaataagttattacagaaaaatgtaaaagcattaaataactagaaatcaaatatttattgcttgtatttgtgccaccattgactgagcttagtatgttatcaaaatgtatttatttatcttttaaagggatgacattttttccttttcaaatgttacagtaaaaccaggtggaagagaatggttttagcagcttaaaaaaaaaaagtacaaatctgaggtttggccattaaaagttttataacaatgggagaagaaaagacaagttgtttcacattacagacctaccccaaccccaaagcctaatgctttcttaccaagtcaaaaaaagagacacatttgatgtacaagctggaggtttccacatgagtaagatatttatgaaaacctagatggaggccggcgggtggctcccaactgtaatcccagcactttgggagattgaggtgagcagattgcttgaacccaggagttcgagaccagcctggccaacactttttgtagagaccccctcgccccggtctctgcctgtggtcccagctactagggaagctgagttgggaagatggcttgagcctgggatgcagtgagcagagatcacgccactgcgaccctgtttcaaaaacaaaccaaaaacctagatgaggcagtggccttttcagcccaagtgccagcagacacagcacaagagactaaaactcaacggcgggaggctgggtatgcaatgtttgggagtataagcaccacacttctggctcagggatttggggagtagggtaaacaaaacctacttggaaaagaatcgaggaagaaaaccaacagttgccttctgcaggggtggggacagggagggaggtagggccaaggcgaggagcattttacatcagtgacctaacctggggagctatcagggcctatcttcagctggccttaagaggaaaaccagatcgctgatgggagaatccacaggagggagaggggaaaagggaatgtggctggcaggaggcaatagccccttcctttctgggcacaggaaggcagtcagggcaccaggtccaggcaatgacctcacaaggacagcacggtttttgctgcccccacctagctcctcattctgctcagcactgcctggtatagggccactctctgccccaagggagtggatgtctctgtagcctggggcttcttctgaggcagcattaccctctgcccccttggcttggggctcctggctctcaggggtagcagcagccttcctttcctgggcagtgcccttgttgctacaggcaccttgctcctgcatttcctctggctgagaggcagaagaactgcccccgtcctccttccaatttttgtggaagagcagsctgctgaatttgaaagacttcttgagagagaacttattaggggagactgcccccttggcctcagcaccctggataggggaygctggctcaatggcatygccagtggccccggctgcctcatgtgttctgttcacagaggcaacactccttcacccttgggagataagtcttcattgcttttcacgtggccatcgtsttgtccgttggcctttgcaggggaagcacctgmcgcaaccttggtggtcacgtcttccgaggagccttggagctctggctgcctatgatgggggtctgctggggggtagccagtatccaacccagactcacaccttggggtagtacagcggggttggctgggcaggcagaggggtggggctggcgtcttacgggaatggggaaacgagctgtacccccattccaacccgctagctgtgcctgctactgttctactccacaccagaatctgttgattagaatttaaaatttgcctactacacacattttaaaaacatacatcaacttaaaattatatatcttcacaaactgctgtgctgtggttttagtgccttttctagaatctaggattagagtaattactggcagccatgcttaattatttggaagtatatgttatctttccrgattgaaattaccatatgaaattatttttccaactttagattattgagaagtgtcagtataattttcagcatatttactgtattcagtgtgttttaataggtaattatattagrcagtttgcaagctggagtttttctgatttttaaaaaaatcagatgtcagtatacagatgccaatattaagttactaaattaatgattttcttttctagaatacaaaatacagttaaaataaaatgtcarcctcctggagtgatcggttacagaatgcagcagatatgcctgctaacatggataagcatgccctgaaaaagtatcgtcgagaagcctatcatcggtaagtattttgtctatttaatcctcaaaacccctctatgaagtgggacttcattttacagatgatgaaattaatgtacagagaggttaagtaaataacccagatcgtatgtctagtacatggtacaaatctagttytaagtcgagacttttaactactagtacaccatactgctttgtgtatctactagtaaaagtatttaagagaaaaatgtcyggttgctagaaaattgcacctaagttaataaaaatttttttttctttctttttttgagggagtgctggatggacagagtcttgctctgttgcccaggctggagtacaatggcgcaatcttggctaactgtaaccttcacctcccaggctcaagcaattctcttgcctcagcctcctgagtagctgagactacaggtgtgggctactgcacccagctagtttttgttttcttttttgagacagagtctcactctgttgcctaggctggagtgcagtggtgcagtctcagttcactgcaacctctgccttctggcttcaagcaattctcatgcctcaacttccccagtagctgggattacaggcatggccccatgccaaactaatttttgtagttttggtagagacagggttttgccatgttggccagggtgatcttgaactcctggcctcaagtgatctccccacctcagcctcccgaagtgctgggattataggcttgagccaccacaccctgccaagaatgaattttttttttttttttttttgagacggagtctggctctgtcgcctaggctggaatgcagtggcatgatctcagctcactgcaacctccacctcctgggttcaagcggttctcctgcctcagcctcccaagtagctgggattacaggcgtgcgtcaccacggctggctaatttttgtatttttagtagagacagggtttcaccgtgttagccaggctggtcttgaactcctgacctcaggtgatccacctgcctcggcatcctagagtgctaggattacaggcgtgagccaccgcacccagcccaggaatgaaattcttgtattttttatttatttacttatttttttttttttagtagtgamagggtttcaccatcttggccaggctggttttgaactccagacctcgtgatccacctgcctcrgcctcccaaagtgctgagattacaggtgtgagccactgcgcccggccaagaatgaaattcttttttttttttttttttttgagacggcgtctcgctccctggcccaggctggagtgcagtagcacgatctcactgcaggctccgtctcccgggtccacgccattctcctgcctcagcctcccaagtagctgggactacaggtgcccgccaccatgcccagctaattttttgtatttttggtagagatggggtttcactgtgttagccaggatggtcttgatctactcttcttgtgatccgcccacctcagcctcccaaagtgctgggattacaggcgtgagccaccgcgcctggccaagaatgaaattattaattgatatttaccacaaactgactgtaatttttaaacagaatttaaaaattgtgtctgctggctactgtgtgttagattgaatgtgggtaactctgggtattagcaaagtttccttgttttgattttagactgtaatattttctcgaaatcactttttctttaaaagtgtaggccaggcatggtggctcgcatctgtaatcccagcactttggtagaccaaagcaggaggattgcttgaacccaggagtttgagaacagcctgggcaatatgatgagaccccaactctacagattttgttttgttttgttttgagacagagtctcgttctgttgccaaggctgaagtccagtggcttgatctcggctcactgtaatctccacctcctgggttcaagcaattctcctgcctcagctgtctgagtagctgagtacaggcgtgggccactgcacctgactaatttttgtatttttttgtttttgtttttgagacagagttcattctgtcgcccaggctggaatgcagtgatgcgatctcagctcactgcaacctctgcctcctgggttcaagcaattctcatgcctcagcctctctggtagctgggattacaggtgtggccaccatgcccagctaatttttgtaattttagtagagatggagtttcgccatgttggccaggctggtcttgaactcctggcctcaagtgatccacccgcctcagcctcccaaactgctgggattgcaggtatgaaccaccgtgagtggtccccaaatatttttaaataaaatttttttcctgtaatcctagcactttgggaggccgaggcgggtggatcacaaggtcaggagatcgagaccttcctggctaacacagtgaaacctcgtctctactaaaaatacaaaaattagccgggtgtggtggcaggtgcctgtagtcccagctactcgggaggctgaggcaggagaatggtgtgaacctaggaggcggagcttgcagtgagctgcgatcacaccactgcacactccagcctgggtgacagagcgagactccgtctcaaaaaaaaaaaaaaaaaatttaaagttaaaattgtatttaaatttttgttttttattttttgagacagagtctttgctcttgtctctcagtacagtggcgcggtctcagctcactgcaacctctgcctcccrggttcaagcgattctcctgcctcaccgtcccgagtagctgggattacaggcacacaccaccacacctggctaattttttaatttttagtagagacagggtttcaccgtgtttgccaggctggtcacaaactcctgatatcaggtgatctacttgccttggcctcccatagtgctgggattacagacgtgagccactgctcccggccttaacctgtattttaaaaaaaaatttattttattagagacggggtcttgctgtgttgctcaggttggtctcaaatgcctgggctcaagcattcctccagccttggtctcccaaagtgctgggattacaggcatgagccactgagcccggcctaaattgtattttctttttacttaactctttttatagattcaattaaatgtttgcttctacctaaatcttaagtagttagggtccttgggagtagataatgtatttagtaattatttatttttaagaagaaattagaaatctacacctaaagtgaatttctggggtagaaaaatctgggccctactagaaccatctttgcctcccacaccaggaaagccggcagtaagtacaggtgctggtatattggcagtgctaaaaagttgcatgggaactacaggaagtctaaaatgactcttaatcayttagctgtttctgggctacaggaaaaaggaaatgaatattactttgaaatcttactggaaaagtggctaaactggtttatgtaggtaagtttttgtaagcagacaaaaaatttctaagtgcagtcttctctgtataggaaagctaagtcagaattaggtaatattttgttgtttcaataratactaatattttgaaaaatatagttacttgttattgagtatatcagaagttaattattatatcaatagttggttttttaagtaggctggtgatatttgcctcatggtaggtcactgtggcatttctgggtgttaggatgctgttactccttaaaccctgaaaaagtgaaaacattaaagattcctgtcaaatgggtactaacgattctcttctgtgtgtgagatatgttgctaggtatggcgtgttaaagtataaaacagaacatttatgtgtgtctatgtaataaaacataacatttggaaaagattatgttatatggagttctatactttttcttcaattatttgcttggtctttacactataaagtattaattaacattagggtgtaacatttttagcagtggaaatgaggactggtaaacattatttaataaacatcctaattatatttaatatatatcataggctgggcatggtggttcacgcctgtagtccacacactttgggaggccgagccaggcggagtccttgagctcaggagtttgagaccagcctgggcaaratggcgaaaccctgtctctacaaaaaaaaaacataaaaattagccaggtgtggtggcttacgcctgtggactcagctacctgggaggctgaggtgggaggatcgcctgcgtctgagaggtggacgctgtagtgagctgagatcatgccaccagcctgggtgacagaatgagagcatgtctcaaaaaaaaaaaaaaaaaaagtgtgcatgtgtgtgtgcttgtgtgtgtgtatcatagcctgaatgagtatactcctaactcatttggaatggtatttcctggaatattttagatggattctgtaccctacgttctttcatatagtaaggtgtatgtactggaaacaatagaaaaaacattttcaaaggcttgatgttttagatcattgaaaaaaattttttatctatgttatttaaagaggcagggtctcattctgttgcctaggctgcagtgcagtagtgtgatcatagttcacggtaacctcaaacttctgggcttaagcaatccacctgccacagcctccccagtagctaggactacaggtgtgtaccacagtgctcagtaatttttattatttttttaaattaattaattttttttgagacagagtctcgctctgtagcccaggttggggtgcagtggcatgatcttggctcactgcaacctctgcctcctgggtctggttcaagcaactctcctgcttcagcctctggagtagctgtgattataggcatgcgccaccatgcccaagtaatttttgtatttttagagactgggtttcaccatgttggccaggctggtcttgaactcctgaccttgtgatccgcctgcctcagcctcccaaagttctgggattacaggcgtgagccaccatgcctagccatgcttggtaatttaaaaaatttttttctagagatgtggtctcactatgttgtccaagctggttttgatcttctggctgcaagcagtcctcctgcctcggcctccaaaagtgctggaattacagatgtgagccatcactcccagcctgaaaaaaaaattaaatgtagaaaatttgggttcttggtatcttgcaagaatttgctttaaaattattataattttttttgagacagggtcttgctctgtcacccaggctagagtgcagtggcttgatcatggctcactatagccttaacttcctggggtcaagtgattctcctgtctcagcctcctgaatagctgggactacaggcgtgtaccactacacctgtctaatctttgtattgtttttgtagagacaaagtcttgctatgttacccaggttgatcttgaactcttgttctcaagtgatcctcctgccttgtccttccaaagtgcygggattacaagtgtgagccaccatgccccgtgtttaaaataaagtatatgtgtgcttttagaacaataaaaacattatatatatatgtgtgtgtgtatatgtatatgtctttttaaacattgacaaaaattgtatgtatttatggtgtacaagttgatatggaatggctaaatcaagccaattaacatgcataacctcttacatttatcatttttttttgtgatgagaacatttaaaatctaatccctttgcaattttgaggtatacagtagattattatctgtactcatcatgatgtagtcatcagacttgtatctcctaacagtatttgcttttgttaattaaaaattttaaatagaaaccatttagaagaaatttattttagttttctagttaagtcaatttgtagaatattctgtttccaggtcttttcattaaagacatttatttggattggtaatttatcattggttaagttaggctatgctgatcattatcacaaagtatacatcgtatgtgatgctttacaatttccctttagaagaagctaaatattcttagttaagtaaataaatatctaacttccagcttttttcttgcttaatatcagttttctgaatttcaatatagagatgccagtcatatgtcattattaagaaactagcctttaaaatgtatgactgttgctccttcttcatttccttatggttgtttagttttctgggctgaggataagtcatcaggccaaacctttcagtggaatgtgttttgctatatggttagaagacaagctgagctgctcagatgtcatagtgacctgaaagaggcagcttcaaaaattacctcttaaatagtttttgtttaatactagaatcttttagtgatcactatagatcagaatttgtatttaccaatccaagaatggaacaattaggtttttcatctgctctctacattgactgtgcccaggataccgaagtcaggtatttagtttttacgtttgtaaagctctgatgcttccagtagaacagaatttctgtaggacaatgaattggctttttctttgtgaacacagcttattaatttagcagtggttttatcatattgaactgaaatgtggcacgttattaggcttgtgaattttttgttaaccagtcttttgccttattttagaaaatattgcagtgatttttctctttaaaattctttaaagacttttgtatatttatcttaaattatatatctgaagtttttttttttttagttgcagtttaggcttccagagccatatcagtctttatataaatctgttgaataatcgtttcttctaaaatcaaagtaaatttcttgtacatgtttaaggagtgaaaaggaatttgtgtatatgtaattttgctagtacttatggcttcgatctagaaatgtttatgatggaccaggcacggtggcttatgcctgtgatcctagcactttgggagacccaggcgggcggatggctcattgagcacaggagttcaagaccagcctgggcaacatggcaaaccccgtctttaccaaaaatacaaaaattagctgggcatggtggtgtgcacctgtagtcctggttactcaggagtctaaggcgggaggattgcttgtgcctgggaggtcaaggctgcagtgagccatgattgcgccactgcacttcagcctaggtgacagagtgagactgtgtctcaaaaacaaaaacaaaaaaaggggaaatctttatttttttttttaaacctcatactaaaaacaggtatcaggttatatgtagatagagactgccaggttgatcaattttaatttctcttttaatcacttatggatatcatatgaatgtcattcagctttttaattttgtcattaatcaagctgagtagtaaactgtcattttagtattggttcaaatattcagtggataattgttaaaatttcagtagccactttgtaaattgaaaatcatgcggaaaatataggtcctctggaatgctgaagagccatgtttcttaaatagtatacatatgggactgggcatggtggctcatgtttgtaatcccagcactttgggaggccgaggtgggtggctcgcctgaggtcaggagtttgagactagcctggccaacatggtgaaaccccatctctacttaaagaatacaaaaattagccrggtgtggtggcgggtgcctgtaatcccagctactcgggaggctgaggcaggagaatcgcttgaatacaggaggcagaggatgcagtgagctgagattttaccactgcactccagcctgggtgacagagcgagactgtctcaagaaaaaaaaaaaagaaaaataatatatatatgggatatatcttgtcggaataagaagagtaaggtagaacatcaaaactgtggctgggtgtggtggcttacacctataatactagcactttgagagaccgagatgggaagatggcttgaggccaggaatttgagaccagcctggggaacataatgataccctgtctctacaaaaagtaaaaagattagctgagtatggtgctgtgcacctgtcgtcctagctactggggaggctggggcaggaagatcacttgaacttgggagtttgaggttgcaatgagttttgattgcgccattgcactccagcctggtgacacaggaaaaccctgtctctagaaaaaagaaagaaagaaagaaaaaaattcaaaactctgttttttgtttgtttgttttttatcattctaatgcttttattcatgtttcgtcttcctaaggaatgacaggtaagaatttagggactggtaagaaatttttcagcttattattttcctcccaaaattctgtgtatggaattctattcagcagtaaaaagtgaactgttgatacgtgcaacagctttgatatatctcaagagaattatgctgagttagtaaagccaatctgaaaaggttacactctgtatggttccatttctgtaacattcttgaaattacaaaattattgagattgataaattaatggttgctaggggtagagattggggtgggtggagggagatggtgggtgtacctgtaaaagggtagcacaaggaataccttatgaggaaactcttgtgtctaactctagtggtaaatatattaatctacacatacacagagtgcatgtaaaactgatgaagtctgaataaagttgtgaattgtgtcaatgtcaatttctttgttgtgatatttttctatatggcacaagatttccccattgggggacactgkgtgaagggttcatgaaatctctgtatcatttcttactcaactgcgtgtgaatctacaattactccaaattaaaaagtttaacttaaaaaattctcttgggtaagccaggcacggtggctcacgcctgtaatcccagcactttgggaggccaagccaggcggatcacctgaggttgggagttcgagactagcctgactaacatggagaaaccctgtttctgctaaaaatacaaattagccaggcgtggtggtacatgcctgtaatcccagctactggggaggctgaggcaggagaatcgcttgaacctgggaggcggaggttacagtgagcctagattgtaccattgcactacagcctgggcaataagagtgaaactctgtctcaaaaaaaaaaaaattctcttgggaggctgaggtggggacatcacttgagtctaagagtttgagattctggcaacagagtaagaccctgtttctagaaaaaaaaaaaaaaaaaaagccacaggtggtagtgcacgcctgtaatcccagacactagggaggctgaggcaggaggatttctgtttttcttttttttttgagatggagttttgctcttgttgccccagctggagtgcaatggcgtgatgttggctcactgcaacctctgcctcctgggttcaagcgattctcctgcctcagcttcccgagtagctgggattacagggatgtgccagcacgccaggctaattttgtatttttagtagaaatggagtttcaccatgttggtcagtctggccttgaactcctgacctcaggtgatccacccgccttggcctcccaaaatgctgggattacaggcgtgagccattgcgcctggctgaggcaggtggatttcttgagcccaggagtttgaggttacagtgagctgtgatcatgctatcatactctagcttggaaaacagagcgagaccctgtctcttaagaaacaaaaacaaaataaaaattttcacagtgacaccttttcttacgtcacatgaattccttatctgttctagatacaagatgctcttaaaaatgtgcagtgataccactatggagtacagattctctaaatgttactgttcaaaagaatgtattgaatcctaaagcactctctctttactaccattccctctatacttcttccaaaaacaacatatctaacagtaaaattaagaagaaaagtggtattggtggcatggaagagaaagaataaaagcagatctgagatttattgaaatagtataagaagaaacttatgttgaggaagtatcatttatatttacatttagatggtgtatttcaccttaaagggtatggcttctgtattaattgtaatgtctgagagagagatttattcatgtttttgtatcagtaatttgttctttttaattactgtgtgtcattccattgtatcaatataccacaatttatttcatcatttattttctgttggtggacatttaggtttttttaatactaaaaacattgtttttggccgggcgcggtggtgcatgcctgtaatcccagccctttgggaggctgaagcaggtggatcacaaggtcaagagatcgagaccatcctggccaacatggtgaaaccctgtctctactaaatatacaaaaattagctgggcgtggtggcgcatgcctgtaatcccagctactcaggaggctgaggcaggagaatcacttgaacccaggaggcagaagttgcagtgagccaagattgagccagtgcactccagcctggcgacagagtgagactccgtctcaaaataagaaaaaaaaaagcattgtttttcagagacacgatttcactgttgcccaggatggagtgcagtggcgcaatcatagctcactgcagccttgacctcctcctgggctctagtgatcctcccaactcagccttccaagcagctagaaatacaggagcacaccaccacacctagctwtttttttattttttatttttcgtagagatagggtctcactttgatgtccaggctggtctcaaaccccgggcttcaaacagttctcctgccttggactcccaaaatactgggattttaggcgtgagtcaccatgcctggctgcctcccaggttcaagcgattcttgtgcctcaggctcctgagtagctgggattacaggtgtgtgccaccaggtttttttttttttgttttttttttgtatttttagtagagacggtttcactatgttggccaggctggtcttgaactcctgacctcaagtgattcacctgcctcagcctcccaaagtgctgggattacaggtgtgagccaccatgcctggcccacatttgagttttttttttttttaagtttttagttattgcatataaagctgttatagactgaaaaaaattcgataaaggacttatatctggagtatataaagaacttttaaaatttaacaatatgaaaataaccaaattatgaaatggttaaaagactgaacatcactaagaagatatatacagatgacataaaaacacatatttaacttctttacccattaggaagataaaaattaaagcaactgtatatatgcctgttacaatagctaaaataaaaaatattgacaatatcaagtgttgccaaggatgtggagccactggaacttctcatacattgctcgtgaacagagagggtgcagctcctctggaaaaacagtttggcagtttcttatcaagttagagaccttaacattaatgacccagaaatcccactcctagatatttaccctagagaaatgaaaacttaggttcacacaatggataatgtttatagtatctctgtttataattgctcaaaactgaaggcagcccaaatgttcttcagcaggtacatacataaacagtatgtggtatatttatagaatagattataactcaggtaaaataatgaactagtgatrcatagagcaactgatcactctcaaaggcataatgctgagtcaaataagacagtcttaaatgacatctggcatgattttatttatatgatagtctcaaagacaaaactgtagtgatggggagaacacattagtgggttctaagagttagtagagaaggaaagtgtgactacagaaggatagtaggggagagttttttggggtgatggaacttttaaatttcagattgtaactattatgtgagttaggattcatagaaatgtatacataaacagtgtattttaaataaactattactgtattttagtaataataaaataatagtaatttttagttgaaaaaaataagaataatgctgttataaatgttcttgaacaaatctttttgtggatatatacattcaattctattggtttctacccaggaatggaattgctgggccataggttaagcatacgtttagtttttgtagataccgcaaaatagttttccctagcagtttatagttccacttacaatgtatgagagcagtatcaccaacactttaatattaatcttttgaattgtgtgtttaatttaaaagttattctagtgtatacatagtggcatctccttttggttttaagttgtatttttctgatgaataaataggttgaacaccttcatattgtaagtagccatttgcagaagatcctcttctgtgacttgccttttcaagttgtttgccaattgtgttgtcttttttttccatattgatttatggaaggtgtgtgtgtgtattctcttaaaaaatagcagcttcagtggggcgtggtggctcatgcctataatccyaggactttgggaggccgaggtgggtggatcatgaggtcaagagatcgagaccatcctggccaacatggtgaaaccccgtctctactaaaaatacaaaaatttgctgggcgtggtggtgcgtgcctgtagtcccagctacttgggaggctgaggcaggagagtcacttgaacccatgaggcggaggttgcagtgagccaagattgcaccactgcactccagcctggcaacagagcgagaatgtctcaaaaaacaaacaaacaattgaattataatttacataatataaaatagaagtatattattcagtggcttttagtatatttacaaagtggtacaaccatttttcattatcccaaaagaaacctcatactcattagtagtccactccacgtttccctctctctccagcccgtgtcagccactaatttactttctgtctctatggaattgcctattctggatatttcatataaatgaacttatacagtttatggccttctgtgtctgacttctttcacttagcatagtattttcttttttcattattttttttttaagagttggagtcttactctgtcatccaggctggagtacagtggcgcagtcatagctcacagaagcctcacactcatgggctcaaatgatactcctgcctcagtttcctgagtagctgggactgtagcactacaggcacaagccactgtgccctgcatcacttagcatagtgttttcaaggttcatctgtattgtagcctatctcagtacttcattattttttattgccaaataatattctattggtcaggcacagtggctgatgcctgtaatcccagcacttcctggtaggtgagacgggcaaattgcatcataataccaggagtttgagactagcctgggcaacatagcaaaaccccatctctacagaaaatacataaattagccaggcatggtggtgcatgcctgtagtcccagctattcaagaggctgaggtgggaggatcacttgagcctgggaagtcaaagtggcagtgagctatgattgtgccagtgcactccagcctggatgacagagggagaccttgtctaaagaaaaaaaatatattgtatggatataccatattttgtttttccattcatctgttgcttaacatttgggttgcttccactttgccaaaccattttccagtgcagatgcatcattttacattccctctagcagtgtatgaatgttccagtttctccaaatcctcatcacacttactgccttttttttgagatggagtcttgctgtcgccaggctggagtgcagtgtggcacgatctcaggtcactgcaacctctgcctcccgggttcaagtgattctcctgcctcagccttccaagtagctgggactacaggcatgcaccacgcacagctaatttttgtatttttagtagagataggggttcaccatgttggtcaggatggtctcgatctcttgacctcgtgatctgcctgcctcggcctcccaaaatgctgggattacaggcatgagccaccgtgcctggccctgcctttttaattatagccatgtgagtgtgtgtgaaatagtatctcattgtggtctttacttgcccttatgaccagtaatggtaagcgtgttttcatgttcttactggccatttgtgtatcttttgtgaagtgtctgtttaggtgttttgcctattattattaaatgagttgtttatattgtggagttgtaaaagttctttatatattctggattctagacctttatcagatacatgattttccaatattgtctcccgttctgtgggctgactttcattaataacttttttggtagtgtcctttgaaacacatgttattttaataccggtgaagtccaatttatgtatgttttcttttttcgagtatgcttttcatgacatgtttaagaaaccattgcttattccaaagtcacagtgatttactcctgtgttctcttctgttagttttacagctttaggtcttacatttacgtttttgatccattttcatttactttttttgttattatataagataggggtccagattcatttttttgcacatgactatccagttgtcctagcaccattttttgaaaagactattcttttcacattgaatggtcttggcacccatgtcaagtatcatttgaacatagatgtatgaatttatttctggactctgaattatatttgtttgatctatttgtccttatgccagtagcacacagtcttgattactgcagctttgtagtaagttttgaaaaacagcaacctactcttctttttcaagattgttttggctattctggtgcccttctatatccatatgaatcttaggatcagcttgtcaatttatataaaaaagccagctggattttgttatgaattacattgactctctctatatataactttgagaagtattgctgtcctaatagtattaagtgttttgatccatgagtatgggatgtctttccatttatttagattttctttaattctttcaacagtattttgtagtcttcattgtacaggtcttgcacttctgttgttaaatttattcctaagtattttcttttctttcttttttttttttttaaagagacagggtcttgctctgtcacccaaggtgtagtacagtgacatgatcatagctcactgtaaccctgaactcctggcttcacgtgattctcccacctcagcttctcaagtagctaggactatagatgtaccaccatgcttagctaattaaatttttttctttttggtggagaagggggtcttgctatgttgtccagtctggtgtctttcattatttctgatgctatagtaaatataattgttttcttaattttatttctggattgttcattgctagtttatggaaacacaactggttttttgtatattaatcttgtatcctgccactttgctgaacttgtttattagctctaattgtgtgtgtgtgtgtgtgtgtgtgtgtgtgtgtgtgtgtgtgcatgttttggagatgaggtctcactctgttacctaggctggatgcagtggctattcacgggcctgatcatagtgcactgtagcctctaactcttggcctcaagtgatccccctgcctcagcctcctgaatagctggaactacaagcatctgctactgcacctggcagtgttagaagttttttgattactgacttaatctccttactactgatagatctctttagattttctatttctttttgagtcaatgttggtaatttgtgtgtttccaggtattgtagtctttagtgtacaagtcttgtactacttttgtctgttttatcttggttacctaatatgttggcatatagttatttatagtattatatctgtttttatttctgtgaggtcagtagtaatgtctctgcttttattcttcttttttttttttttttagataagagtctcgctctgtcacccaggctggagtgcagtggcgcaatctcggctcacagcaacctccgcctcctgggttaaagcgattctcctgcctctgcttcccaaagtagctgggatgacaagtgcccgccaccatgcttggctaatttttgtatttttagtagagacagggtttcaccatgttggccaggctggtctcgaactcctcacctcaagtgatcgcctgccttggccttccaaagtgctgggattgttaagtgtgagccaccgtgcctggcctctgcttttattcttgattttagtaatttgagtcttctttttttgggtcagtctagctaaatgtcaattttgttgatgtttttaaagaaaaagcattgatttttctccagtgctttagattttgtatatatatatttaaatctctgctctaatctgtaatatattatttctgtccttctgtttgatttgggttgattttgttcttctttttctataatttcttaatgtggaaggctaggctattaattgagatgtttcttctttttaaatatgtgcatttacagctataaattttcttctgagcactgcttttgctgtaccccaatgattttgttatgtcctttttttcgttaaattgtaagcgttttctagctttctttgtgatttctattatttaggagtgtgttgtttaatttctacatatttgtgaatgtcccaaattttcttttttttttttctttttgagatggagtctcgctctgttgtcatgctggagtgcagtggcacgatcctggctcactgcatcctccacctcccgggttcaagcgattctcctgcctcagcctcctgagtagctggggctacaggtgcgtgccaccatgcccagctaattattgtatttttagtagagacggggtttcccagtgttggccaggatggtctcaatttcttgacctcacgatctgtccgcctcagcctcccagagggctgggattacaggtgtgagccaccgcacctggccccaaattttcttttgtcattgacttgtacttgcattccattgtggttgtagaacatattttacatgattttagtccttttaaatttactgtgtcttggtttatgggctactctgtggtctatcttgaataatctctatgcttttgacaagaatgtgtattctgctgatgttgagtggcatattctaaagatgtctttaccttaatttktgtagcatttttcactgggtatgcatttttatatgtattgtagaaatcatgagttcacaccattacatctaatgctagtccatcctaggaaagttccttcttgttcactcccattccatgtttgtatatctcttgttccacagtgaaagccctggctcctgacatcatcaacatatttagtttgcttaatctaaaattgcttcagttgattaactcataccataacaaacaaacctaaaaagttcaggatttatttgccattcttccactttcttaccttaccctgccaaagtctaaaggcttagactttgtgttttttagttccttggattagttcgttcttgctttttttctctacagcatggttagggtatttgtatacagtataattaggttcatttgtttgctttcagttaagtgtttttttctttttcattctattgatctaatttttaaataatttaacataatacaacatttcataatacatcctatgttatagcattattatatataatatatataagagtaatatacatttaaaagtcaaaattatgcaaaaggcatatcagaaatgttacctaccaactttgggagacatatgggttcacggcattctcctgcctcagcctcccgagtagctgggattacaggcacgtgccaccacgcgtggttaagtttttgtatttttagtagagatgggatttcactgtgctagccaggatggtctccatctcctgacctcgtgatctgcctgcctcggcctcccaaagtgctgggattacaggcgtgagccactgtacctggcccttgaaagttttttttttttgagatagagtttcgctcttgttgcccaggctggagtgcaatggcgtgatctcagctcaccacaacctccgcctcctgggttcaagtgattgtcgagcctcagcctcccgagtagctgggattacaggcatgcgccaccatgcctggctaatttcatatttttagtagagatggggtttcgccacgttggctgggctggtcttagaactcctgacctcaggtgatccgcccgcctcggcctcccaaagtgctgggattacaggcatgagccacggcacgtggccccttgaaagctttttaaaagaggactttaattgttactacatccattattaggaagcaatttctaaatattaccaccatagatccaagaagtgaggaataatatagtcaccatgctcaaattttagtgtcttatttaagcacacatgcatactttaaaatgaatctaattatttctagactctggccttttcattcctgatagtattgccatggtccaggcccttgttatcgctgtcctagattacagcagtatccccccgtaggtctccccaccttcagccttgtcctcctcaaaaaaatttttttttcaagagatggagtctcactctgttgctcaggctggagtgtaatggcatgatcataactcactgtggtcaccttgacctcaagtaattctcacacctcagcctcccaagtacctgggactacaggtgcatgccaccatacctggctaatttttaaatttttttttgtagagacaggatcttgtatgttgcccatgctggtctaaaactcttggcctcaagcagtcctcccagttcagcttcctgagtcgctgggattacaggtgtgagccatggcacctggccaaattcattttttaaataatgttataatcctgcttagatcctttagtgatatcacatcgagcatgcaacaggataaattctaaccccgccaagactctctaagactgatctttttctgtccacttttgtgttgagcagttctcttcctcagattctgtgttctgtcaactgtatctagctttgctttttctctgagactgggtcttgctctgtcacctaggctggagtgcagtggtgtgatcatggctcactgcagccttgacctcccgggctcatagctttgtttttattcacacatcatgatgtttatgtcattttgctttttgttyatggttcctcttctgttggagacctcttcttttcctcttagcctgctgctaatacttttagcctggtgattaagagcttggggctagggttggcattttggattgttccatttctttagaatcccagcatttaagttttgtaaattttaattttgtaatcttttaaactggaataactttacctcatagagttattgcaaagattagatgaggtaataaataaagagcttagcacagtgtcagtttttaaaaaacagtatctcatcctatctctaagactcagccaagaggatctatatgtccctctctgttgtgcgtatctctaatactactattaacacactacttcatagctacttttgaatggaccttctcactagcttcttaaaatcaaggacttccaagtttatctttgtatcactggtatctggcacacagacattcagtaaatatttgtttaatgtatgcatggagtttgaaagagctaatcatctttagacaatgccttaccttttgcacaggaagcttctgtaagtgtgtaccctcagttcaagtgataatttttgttttcctttctctttgccaatagtaaagtcttaaaatagtaattacatttatttccactgcactgagctgtgataccacaagctgaaaatctagggaatccatgggaagttggcacccttaaggattagatcatttttccatattcaatttgtattcttgtagttatggaatttgctttgaggatagtcaatggaaatccttcatatttgtgtaaaacttgagatttagattttttaaaaaagtatttcccawgagatatattaatgaggcaatgcctgataatccagttgcttttcctgttcccctaccctcagtaatagttcttggagcgcttacatgtgacagacaacatccctaccagatgttatcttcccttttatagattaaaacgctcaggcttaggttaagtaacttattcaaagttccaaagccagaaagtggaggagctggaatttaagccttagttcttctagtgcccattctctttccattacaccatactgcttttctaaataaactgaaaataattttcttttgktttttcttttttattttttctaccttaaagtcttttatcccttaattttattttgaatttatagtatttagtagtgcttttaattacttagtaactatttaaacattttaataacaaaaagaaacctttatggtaagatatttaggtaatatttaaagggataaagcttttaaaaattttaagccttaattcaagtagtagttctttaaggtatatgtattttatttttaatttgaatcaccgtgaggaggatttgccatctcaatgttcttagactttagcagacttatttatttcttcccctgttgcataatccctatgcattatattggtcrggaggcaggaatgttacagattcttttttttcaaagctcagtttgctctgagatttggaattaacctttagaatgttctggatttatcccccatatgccaaagatctgtaaatatcttttcacatgagctgaaattttcaggcgattaagtgaaatatttgtgaacgcagatgttttgtttaaaagcagttaatgaagtcagaaaaaaaaatacctcgctgtggaaatactttaggttcctcctgtaatatgatctgcacatacttccttctcttgtaattcacattgtttattttctgagggaggaaataactacactaataattaaaacataaaattatttatcctgtgttttttgctcccagagtaaactaaaaatgattttgaccgaccagggctgcttgattctgtgaaactcacattgtttgcgtactgttggagggcctcattagggggtaaatttgctttttctgtgtttgccagtaacgattcctgtctcttacaggaacttgccatttggattgtctccttccttaactggccagccttaaacagttcaggccattagttatttttcctagtcttgaaatttttaaaaaaattattcttaagttttcaagtatttaaagctgaggatattggtcactgagatattgcctagttagggttcggcattgtgcccaaatttgttgggcctctcagggcctgagttctctgtgctttaacaaatgagctacagttctcaagagatcagtgaagcttgtttgttgatcctgtattctcatccagaggaagtagatctttgagaatgtctaaggaagggtaagtgattttattattctttctctttcatttttctcagtgaagaggtatcatctgcatgaattaaaagattaataagcagtgctaccagtccgagagtggaggtagaggcagagattgaaagaaattcagcccaaatcttatagtgtttcatgtgtaatctactataaagttgctattgttgttttgaaagacagcactgagtaagggcaatcttaataggaattttgtaagatataagtactttgtttactctgtggtaaattcattttgtttttctgcagaatgtatttatcaagattggaagcaaacggtggtttaccgaagaattgagggaagcttaaaaattcaatggcgttttaaaataagttgtacctttagaaaatggtgtgaaatatttagtgaaaaacagcctatgattttgtttctggggcatgtaggcaaaaaataatttagagtagaattccctattctaatttgctttgcaatataagatagttccatattatttttgtattattttctcttatgcttcagagtctgaattattactgattctctttttgtgaccactataataagtgataagttaataactgcatactgttggttatttcatttctagccttcaggcataactagacctggttaattttagagagatgtttcttttaataaaataggacataaatctctcaaaaaaattctttaaaaatacagtaaaagtttagtttttatttttctggaatctattaattatctttctagttcttttgttctgtaagaaaatttgaagtggttccagagcctcacatttacaacttattttaatctaatcatgtattgattatgaacaaaataaaattggcccactttactgctatttttagatttcattattgaataacgagaacaaccaggggtataagtaattctgtattatttttagaccttttatgacatcactagaaatttgaggtttcttttaaatgtgaaaattatgaaaggactgctgttttagattggtatattttcttaaaggactgcctttttaggttggtatattttctttccttctaccactggctatagataggtaggtgttaaaccatttttatgataaggactatcacaggtgctagtatgtttgtcaatcttgtacacagggttgtttataaagctattatagtttgtagatttaagatgaattgtatttctagacgcggttaaagttcttggaagtagttagtgctaatttttaccctatggtaaagtatatgttagacttggttagttagagaaagttggagggacctatattacccctctaggacactgtaacggcagattttttttttaggtttatctctaggagcctctggagcaatgtctgtactgtccgaatggataataagtgcatttgaagtacatggagtatataaatgacatcaattaagttttattctctatgctatctttagaaataaatggatacattttgtgcttggggatgaaaaaaattcttacattcaccgttttcataagtgcaatattgacatttagtaccgtgttatcatttgatagctatgaaatatttccctaatagtaataggaaaagattaatagagttaaatcacccaaagttatacttgagctttatgtaagtctatggtaattaagacagtgtgataytagtgttaagataggcatatagattatggaaccaaatggggagttcatagacccacatatatataatcaattgattttcagcaatgaagttaagctaattcaatggcgagaggctagtgtttttttttttttttttaagaacaggtttcactcttgttgcccaggctggagtgcagtggcgtaatcttggctcaccgcaacctccacctccaggttgaagcgattctcctgcctcagccttccttagtagctgggattacaggcatgcaccaccatgcccggctaattttatatttttagtagagacaggatttctccatgttggtcaggctggtctcgaactcccgacctcagatgatccacccaccttggcctcccaaagtgctggggattacaggcgtgagccactgtgcctggccaggagaggctagtgtttttaacaaatgtactggaacaactgaatattcatataggaaaaaaaaaatgaaccttgacccttgacctttatctcaaactgtacattaaaataaatggatcatagacctgaatataatctttgtgaccctgaatgaggtacacatttcttaggtaaactgaataaaaattgttagacaaaactgataagttgggcttcatcaaaatttaaaaaatcaaattcctgtttcttgaaagacatcatgaagaatatttaaaggcaagctgcagactgggagaaaatattctgaatatgtttatatctgataaaagacttggatccaaaatatacgaagaactcttgtaattcaataataagacagcccagtttaaaaacgggcaaaatatttgaattgatgcttcacaaaattggatttgaaaagatgttattggtcattagggaaatacaaattaaaactatagtgagataccactgcacacacactaaaatggctacaattaaaaacactgactgtggagcaatggtaactctcatgcattgctgataagagtgcaaaagagaaaagagttttggcaatgtctttttaagttaaacatatgcttaacatatgacctagtaattccatttttagatatttacccaagagattaaaaaatgcccacataaatttgtatgtgactgtttgtagcagcattatttataatagtcgaaagctggaaacaaaccaagtgtccattaactgaatggataaacaaattgtggtatatccatacaatgaaatactcaggaataaaagaactaatcatatatgcagcaacatggatgaatctcagaagtattgctaagtaagccagacacatgacaaagtaatacttgattccatttatatgaaaactacagtgacagaaagtactagtggtagctcagggccaagggctggggagggtattgcaaaagaacatgaaggaattttttggattgaagaaaatattctacatcttgattgtagtagttgttgcatgagtgtatacygttatcagactcaccaaaattttcatttaaggggggtgaatgttattttaagtaaatgataccttagtaaagttggtggaggaatgagacttgagaagctcctcatcctgctgatttaaaattttgtaaagcggttgttgattgttcatattcaaaaggatatctttgggaaaatatggttgctcctaggatgtgtaatgcagggaaaaatatactctctttgcagtgtcatgattgaattagccctctggagttgttaaagtgcttttttttttttttttaattactagagttgctgtcgtttaggtaaaaggccaaaatgaattttattatttgtttttattttaaattctgggttttgacctttcttccaatataggcacagtatacttgttaatttggacttagctaacatggataaccatattttcttctctaatttctatctcacagagtttaaccctgaaattttgctgtgttttatgaatgatcctctatacactggtctttcaaaaattgtagagaaaaagtgaaaaacaatttagaggaaaataggaaamaagggattggaaaagcctatgcttaattagactgaggttttagaatagtaaatatattcttagaagtactggtattgtcctggtttctcccgtaacttgtgtatttttctaatttggtagtcagccctctcttatatttcctaccatcctgctcccattatcacaatttcttcatttgagaatgaaggtgaagggaattttaatgtcttttccttaaatatttttgatgaatctccttaaagtgtgctttaaaatctttgctggaaagagagtctgcattatcatcagtactcctattattttatagtttttaagatagaccttcttttacatttaaacatcccagaaactgggctatatctggcaatataccacctagaattcaagttgagttcttccagagaggatttgctttcgcttctttcggtcacctggggaaaatatcaaccatcctgatagtataaattcagagcacaacctacatgactgacttgttcaaattctcagggagagattttccccctccctggacgcagtacaaaatgggaaatagatgtacagtcaaggctgagatgtacagatttctttgtgggcccttctgtgttgtagatatatttctcccttatcctcatattatgagtatatcccttttgctatcctaactttttgtggaatctcctaggctgtgacttggaatttccccccttttcttactggtatataatatgggtacattttataattgatggcattttaaatcttaatcatcttaaattttgttccatgtatgtctccatactgacttttctctggaacttttaaatactgagtatatgagtgagtaaaatgagtattataatttcatgttttattttataagtgataacacatttgttcagatttttagtgtgtgtgctgccgaagtgagcactgttcagatttttaatgcacaggaggctgttcttttttttttttttgagacggagtctcactctgttgcccaggctggagtgcagtggcacgatcttggctcactgcaagctctgcctcctgggttcacgccattctcctgccttagactcccgagtagctgggactacagcaggcacctgccaccatgcccggctaatttttttatttttagtagagacggggtttcaccatgtcagccaggatggtctcaatctcctgacctcgtgatccacccgcctcagcctcccaaagtgctgggattacaggcgtgagccaccgcacccagccactgctgttctcttgacacaatctgataaacaaaatgtatccctcttgatgttcctcagagaaaatgttaaaacaaattagtaagaagttactggttagaatttatgaaagcaaaactaatgctactagatgtctgttgcttttagaatctaacccaaaatttcttgttgtgtctgtatgtccatggtatttgagctttgaatttttaagaatccatttcataaagttcttacctataatactttttatatcattaagcatactttttacggaggatggagacataatggcagactgaggtcttcctattacttttttttaataacagctttattgagatacaattcacgtatcattcaattcacccttttaaagcatacaatttgatcattttagtatattcacagagttgtgcaaccaataccgctatctaattttagaacatttcattacccccacaagaaaccctgtacccattagcggaaactgcccgttccctcctccccacagcctctggcaatgacaaacccctattaagtttctagtttaagcttaatttttagttcagttaaatattgtgtctgctattacaaggccctatgttaggtgttgggaagattataaatcctggtctcaaagtttataatccaataaagaataagagaactaccatattttatgtctatgacaacatatagtaagtgtcaaaacagggaattttgaaggtttaagcctctcatttgggtcacaactttatagaattttagttgctgatgcagtttctttcattaagtagaaaagtaatgagacccagagacattactgtcacatagttctgtggcacaaccagaatattgatagttccttgacaaaatcacttgagatgcagggtcttgataattagagataactgaggtggcccttttagggaaaagaatataaacaaagccttagggcatatttaggaaatagcaagtagctcactttgattactacagccaaaggtgcatgatgtgggacaatgtaagatcaaactgattttgacaaaatgaaagtttttgaactttaagatccaataatttgcaatttattaattgggtaggtagtgagcgatgactaaaagttcttaagagagtgatatgattggatcagggttttaggacagtgcttctcaaactgtctgtgagggaggaccagtttataaataacttttttccaatctgtttcaaatggacacgtttataaaataaaaatgaatttcaagaaaaatgaagacacaaaatgtaagcctaccttttttattactacattcaacaaacaaaattgctctgtcaaattactgtaaaagtttctaaatacttaaaatttctgtatgtgtcatgtcatgggttagcaacaaatgttcataatccagcattggcctgtggaccatgctttgagtagcactacttcaaagcaattaatttggcattagtgcgagggcagagcaattgggagatgattgctggactaatgaggacctggacatgttgttagcactgtgaattgaatggaagattggattccagagacgtttggtaatttaaatgaaggcacattagatgattggatgtggatttgaagaagaggaaagaatcaaaagatagtaactagattttaagcttgagtgggagaatgggagtgcccatagcagaaataggaactagtttggagattgggttttcaacaaaaaatccacattatagcattttctattaagtaaaaatatgcatatatacagacacatactttttagttcataatttcaatttgccctctcaaaaagcacttgtaactttttcttttcttgattgtagcaaattttcaatgtgtaattatgcaagcccataaggaaaacagatgcccaagaagattttatacttgaatccttagtctcatttgttgttgcactaactgtcattgggcacttggccaggaaattgtgactcctaggcaaggggaggagttacagataaagttcaccattgccaaagaaattctattccaaatggatttgtgtggagcaacagtgatatccaatgacaagttaaattaaacacagaggtgttttctccagcactgtctcggaagatacatgcttttgaggggcctgattcaggttaaacttcttgaagttaagtcacaaaaaaactatactagggaccttacgaagaattttgttatgtgacttcaagaactagttgactcagatagttttacacttttcaaaacggcaaccagtgacagatgaggtaatactgctttgaattacaagttaaagccattaagattgctatttacaaaatttcaaatttaataaattgcatgttcatgttacttaagtgtgagaatattcttatttctaaagcacattatattaatggctctatttcttatggttaatatttatatttacttggatggagtttattcaagtttaatgtcttaactgctgtgggatatgataataaaagctgttacatttgtctttatattgaagtctgtgcttygttttagagtgttcctgtcacctagagattgtttttcatgttaatgctcaaatctgcaacttacaaagacttagtatgttggaattgctggctaattgtgctttaagattggatgcttagtttagtcatgctttctagggcggcaagtttgtgcttttttaaaagcaagcttcgggaagttaatttctccgatatgttcaagctcttgaacataggggtggagtatgttccacttgttaataatttagaaatgtgacacagtaaactgacattggcaaaggtacagtcaaggtccggagaccaatagaaatttttggattcctcaagcagataaatctttttgttttgaaatgtatgatggggcagtgggccagccttgtaattgatatagtaccttttagttgatatagtacctaacactttgttttgctataacctcagtgaagagtagtcattagtttgagaccaagagattagtttctcttgaagactgtatcctggagacatggtatttcatgctttaaggctgcctctgtgctgaagtcactgcatactttaagcatttgggtgtttattatctttgtaaactgtggaatatatagccaaataactatatttggcttattgcagttctctataatacagctgttctattttgccattatagctttgcttatgcacttcagctattcatacaacaaattagatttaattccacactgcgcctcccctcatgttttgtagcctagattagggaaagaaaaggaaagatgagaatatatgtgaggcttttcatttttataaatatcataatagaaatgaattggggggagacagaagtgattgtttctaagttcaggaattgcttttgtggttagagcacttattttgaatgaaaatggaaagataaaggatatttggtagaacttcataggaaaacatcatatttcctaattttagactcttataaagtctgtcctagctctttctgctccctaaagaacagcttatatgacatatgtcacaaaatggtatctgctttgtagtagacaatgaatgtgttgattgaatagttaatgtgactaggttaaagagaggagaagtgcaatttgatggatatgtagcaatgattattttggcaaaaccagattttcatattcctgaaatatgttattcctagagtttacatagataataaaggtacattataatctttgaatccttaaaaatatacataaatgatttgatatattttcatgacagtacaagcttaatctcttttctaacaaagaaagaagctggtacttggctgagactgttgttcttgtcttaagcactgattgacattaacagcaaaatctcctttttcctgtaatgttagctgtgcttgaagctagctagcatctttcttctatgagagtaaaagctgtttcttttattatgtcgttccgcatacttctctcctggattgtatcacaagggaaaaaatcatccccaatccattcctgcttgtattcccatagaatattttaggcatgtcagctgttagggcctgatcaaggatttgatccagttggctctctagcctgaattaagaatctgtttgaaaagccttcagtagttacatttagtttctagagctacaaccattattttgtcttttatccctgttgtactttcaaaaggatttatgtaactgggaaaatataataaagtagatgcttttatcagtaataacagggtgatatttgatgaaatattagaaggtgatatgtttgggggctggaggttggagggtgttttttgtttctttgtttgagacagggtcttgctctgttgcccaggctagaatgcagtggcacratctcagttcgctgcagccttgacctcytgggctcaagtgatcttcctgcctcagcctcttgagtagctgagactataggcatgtgccactacacgtggctaattttttattttttgttgagatagggtctcactatattgcccaggctggtctcagactcctgggctgaagcagtcctcccaccttggcctcccaaagtgctgggattataggtgtgaggcaccacttctggtctcaaactcctttttaaaaaaagtctccaaggccatctctacaaaaamaaaaaaaaaaaaaaaaaaaaaatagctggacatggtggtgcgtacctgtggtcccagctacttgggaggctgaggctgaggtaggaggataacatgagcctgggaggttgaggctgcagtgagccattatcacaccactgtactccagcctgggcaacagagtaagactctgtcttgaaaataaataagaaacatatataaatatataaattaggcatttttaaatggtgaggtaaatatcaatagaagatctgatattttctttctgtatcccagtggaggctttttgcatcccttgatgcagttactcttctttggagaccattgacctagatcactgatgggggagcccagcccaggcttttttatttttaacaagttactcaggtgattgtgattttgatgtacactgcagttttgagatccactgatctatatcattctaatttcctacagttacttatgaaatgaagacaaagaaaaggtttggtaataagaggagaagccatgcagttttaactttggctaccaagctgaggatcaagtggaaaggataaccttattttctgtcttttccctttccgttccctttcctcttttcttttctcttttctattcttctttttttttttttttttgatggaatcttgctttgtagcccaggctggagtgcagtggtgtgatcttggctcacggcaacctctgcctcccgggtctaggctcaagcagttctcctacctcagcctcctgagtagctgggattacaggaacacgccaccatgctcagctaatttttgtatttttagtagagacagggtttcaccatgttggccaggctggtcttgaactcctgacctcgtgatccacccgcctcagcctcccaaagtgttggaattacaggcgtgagccaccgtgcctggcccttcctttcttttcttctttcttttttttctttttgaaacagggtcttactctgtcacccatgctggaatgcagtggtacaatcttggctcattgcaacttctgcctctcaggctcaggagawcccacttcagcctcccgagtaactgggactacaggcatgtgccaccacacccagcttttttttgtattttttgtggagacggggttttgccatgttgcctaggctggtttcgaactcctgtgctcaagcgatctgcctgccttgtaaagtactgggattacaggcgtgagccactacacctggcctttatttttaaagatgattaaaacttaccctgaaagaccatcatgctgatgatctaccatactattatatgttcagtttttcctatgtcttcatagtgatctttctgattatttcatttccttaaactctgatattttggtcttaaatgcgggataaagtccaaattccctaatgtggcttacaaaatcttcaggattttgacccctactaacctttcatagcttttattgctccttcccccatccttgccccctggaaaacctctttctgtgaaaacaaacagaagcaaaaccaaagaaagcttctcaactccagccacaataaatgctttgtagtttactgtaaaccttttctttgcttggttattttgcctgcgttgcctttcttgcattttcctaatggaaaactactgattgattaagattcagttcaaacatttcttcctgacctctctaaacaactggtactctctcctccatgttattttatagtacttactgaattgctgaaattatttaaaggtctccttcctagtaggctgagttcctcaaggataaacagagtaaattacaatataagtttcatgagggctggtacagtcttttgttcaatcacagtatctgggtgtaatagacagtagctatttatttaattagtctatatttttatcttcagtgggctttaaatgacttgtttattaaataaattataaattaataagtgaatgagttataaaatcccaaaagtaatcttattttatggggtcagactttggaaaggagagcctcttccctgaaatcttgaatacatggcatttttaatgccaggacacaatacacaaatctgtatatttttgtataatatctgatttcatttactgtataagaaagacttggataatatttttcaatttttaatttatttgttatttttttgggaacagggtctcactctgctgcccaggctgaagtgcagtggtgtgatcttggctcactacagccttgatctcgtagactcaagcaatcctcctacctcagcctcccaagtagctgggaccacaggtgcacaccaccatccccagctgatttttgtattttttgtagagttgggttctcaccatgttaacctaggctggtctagaactcttgagctaaagccatctgcctgcctcggcctctcaaaatgctgggattacaggtgtgagccactgctcccaaccttgaataatttttattatggattttaatattggtatttaaatgagaagatctaaaagaaaacaaaggaaaagcttcttgaccttggtctcggcagtgatttttttggataggacaccaaaagcacaggcagcaaaagcaaaaacaagtgggactacctcaaactaaaaagcttctgcgcagcaaaggagaaacaaaaaggcagcctatggattgggagaaactgtttgcgaaccatgtatctgttaagggattaacatctaaaatatatgaggacctcaaacaatagcgaaaaaagaaatgacccaaaaatgggcaaaggacctgcatagacatttctccaaagcagacatgcaaatggctaacaggtatttgaaaaggagcttaacatcattaatcatcaggggaagtgcaaatcaaaaccacaatgagatatcatctcatacctattagaatgccttttatcaaaaagataagaaataaatgttggcaatgatgcatgaaaagggaacacttgtacactgttggtggcaatgtaaattgatgcagccaccgtggaaaatgctgtagagcttcctaaagaaaatacagctgccatatgacccagcagttcttctagttgtatgcccaaaggaagtaaaatcaccactttgtgaagatacctgcactcccatgttcattgcaacattatttagaatagctaggagatggaaaaaagatatctgttgatgggctgaatgaatggataaagaaattgtggtatatatacacacaatggaatattcagccttaaaaaaggagattctaccgtttgcaacaccatggatgaacgtagaagacattatgctaagtgaaataagccagacacaccaaagaatactgcatgatttcacatgtggaatctaaaaaacaatcaaaaaaggaaaccatagaaacaaagagcaaagcagtgattggaggccaggcgcggtggatcatgcctgtaatcccaggactttgagaggccgagataggagggttgcttgagcccaggagttcaagatgagccagagcaacataggtgarcctctgtctctacaaaaaataaaaaattatccgggcttgctgacgtgtgcctgtagttcctgctactcaggaggctgaggtaaggaggatctcctgagcctaggaggctgaggctgcagtgagtcatgatttcaccactgcactccagcctgggtgacagagtgactctgcctcaaaaaacaaaaacaaaacagtgttggggaaggatggaaagatgtagatcaaagggtacaaagttgcagttatgttggatgaataagtctaagagatctaatgtatagcatgagggctatatttaataatattgtattatgtactgttaatttgccaagacaatagattttaagtacttgtaccacaataaacaagaagaaagaaaacaaggtaactgtatgggataatgggtatgttaatttgtttgactgtattaatcatttcactgtgtatatgtgtatcaagataagtatatcaaacagcatgtcgtgttatacatcttaatatataattttaaaagtttaaaaaatcaattggaaaaataaatgagaaaacctagaaaaatagccaaataactttattaaacttgagaatttattttccagtgttgagatattattttttattattttctatagggtgtttgtgaaccgaagtttagcaatggaaaagataaagtgttttggttttgatatggattatacccttgctggtgagtagcaatttctgattgcttaagaactgctgctttgggtataacacagtgggttcacagtaggcaattcaattgacatttgctgacttaatcatgtatttggctgccagaagcttttattatcaggttgcttccagtaagatttgtgaatattgaaattatcagatatccttgagatgtggctcatgagtttgtacacatagatagaaaaagtactaaattttactattttagagaccctggtaagaaataatatggtaaaatcatatattgataggtatatttgggcatttttgacttttactcttagccattctttaggtatgagattttgtgtctcttgcactgccacagataaacttgtatcagttaaaaattttagtttttttttttttgagacggagtttcgctcttgtcctccaggctggagtgcaatggcgcgatcttggctcactgcaacttccacctcctgggttcaagcgattctcctgcctcagcctcccaggtagctgggattacaggcatgcaccaccacacccggctaatttttgtatttttagtagagatggggtttcaccatgttggccaggctgatctcgaactcctgacctcagatgatctccccacttggccttccaaagtgctgggtttacaggcgtgagccactgcacccggacagtatgttattcttaacacagatgggaaatgtgttcattttccattgaaatgattgcacacgtagtatgtataaggctttttaaaaactagagctgcagccacataaaggaatgagtttgtgccttttgcagggacatgaatgaagctagaagccatcattctcagcagactaacacaggaaccaaaaagcaaacactgcatgttctcactcataagtgggagttgaacattgagaacacatgaacacagggagggggaacatcacacactgaggcttgtcggggggtgagaggcaaagggagggagagcattaggacaaatacctaacgcatgcagggcttaaaacctagatgacgggtttataggtgcagcaaaccaccatggtacatgtatacctatgtaacctgcacattctgcatatgtatcccagaacttaacaaaaaacaaacaaaccccaaaaaactcagagatgtactggggtttcttttctgtacctrgggtatatgcaggaatttagccagtcttcccaatggtcagctgcagttagatggaggactgggcaagaagtcattgaaactccrtgacaaatatggaaaagatgaacttcttttttaacttgtagaatccttagtctgtgtagatgttttcatcagcatgttttgtccttatgaggatgtggggcattgggtaccatctcatggtctcctatttgtgtaaactttgtgtttaagtttccacatccttttttattaaataaattatatagcttctgaaaccaactaaccaaccaaccaaacaaaaaactagagccattagcttttttcattatcctgtagcccttaaacaccagcactgtgctgtttttcccttccttctctaagatatatttgaaagagtcaatgtattaatcagtagttataacatctttccagaatttagtaaaatattttcaatctcgtggaaatgcatttaatttaagaagtagtggggatgagggatcaagttgagcatatatgcttgcacgtgtatgtgaaactgtgacacacagaatctttcagaaattgtctgttaaaaaattttgtctttacacaaaaaccttaagacgtataaagacacttctcaggaactattaatataacagtattaatttgtccatctcaaattagacaaatcacagtttgatgttcgatttaggctacaaatgtgaatgaataatacgtgttcaaamacgaaattacgggagtacttgctacatagatacggtcatgatttttttaccaaacaagtaatacattaaaaatatacacagttcctgatttgaatttttctcttccctccatactctttgtcatttatttgtttttctattgccttaaccttatttttgcagcatttaatgtttttctaattggtcacagacacttttaggagcacttgtcagaaagcaggggaaagcagtatactttcccaatgtagatcttgctgttcaaatgggaagaaaatctatagtctcttctttcaagattctagctctctagggaaaggaatggtgagttaatttggcagctgaaagagattatctaaagcagaaatagaagttaatggtgtcaaaaagtgacaaatatttttcccttggttattaagacaatctctttacattgaaatrgttcaatttagtaagtatttattgagaatctataatgtgcctggcacattttgttactgaaaactgaggtgattatatattcccacagaataatgaaaaaataaactatcttgtatattgaaaaggtcacttaattggcctggcgcggtggctcatgcctgtaatcccagcactttgggagactgaggcgggtggattacttgacaggagttcgagaccagcctgcccaacatggtgaaaccccatctctacyaaaaaatacaaaaattagttgggtgtggtggtacgtgcctgtagtctcagctggtcaggaggctgaggtgggagaaycgcttgaactggggaggcagaggttgcagtgagctgagatggtgccaatgcactccagcctgggcaacagagtgagaccgtgtctcaaaaaaaaaaaaaaaataattaactgaatctgtctctaaactttaatgcaccttatgatttcttctttttgttttttgcaatgccacttcgtattttaatgctttctcctagtctacacacaaacatactttgtgtatatttaacagtaagtggtaacatttattaagtacttattatatgccaggacccgttccaagtgctttattacatagattatctcatttaacacatggattctgtcattcacatctgttatttaatatttacagaaaccctgtgaagcagttactactatcatctccattttacatatgactctgagacatcaagcactttgtccaaggacatttagttatgatatacctgaaccaagattcaaacctaagcatgcatgtatgtataggcatataatgttaaaatgatcattttggataatgacagtttatcgagattttcatatgaatagaaacatatggtgtattagtctgttttcatgctgctgatagacatacctgagattgggcaatttacaaaagaaagagggttttttttttggaggcagagtctcgctctgtctcccaggctggagtgcaatggtgcaatcctggctcactgcaacctgtgcctcccaggttcaagagattctcctgcctcagcctcctgagtagctgggattacaggtgcccaccaccacacccagctaagttttttgtatttttaatagagatggggtttcaccaggttacccaggccagtctcgaacccctgacctcaggtgatccacctgcctcggcctcccaaagtgctgggattacaggcatgagccaccaagcccagccattttgttctgttttgagatggagtcttgctgtgtcactcagcctggagtgcagtggtgcgatctcagctcattgcaacctccgcctcctgggttcaatcgattctcctgcctcagcctcctgagtagctgggattacaggtgcctgccactatgcccggctaatttttgtatttttagtagagatgtggggggcagtgggggtttcattatgttggccaggctggtcttgaactcctgacctcaggtgatctgcctgcctcggcctcccaaagtgctgggattacaagcgtgagccaccgagcccaaccagaaagaagtttaatggacttatatttccacctggctggggaatccccagcatcatggcagaaggtgaaaggcatgtctcacatggcagcagacaggagaagagagattgtgcagggaaattcccctttttaaaaccatcagatctcatgagacttattcactattacaggaacagcaagggaaagacccactcccatgattcaattacctcccactggatccctcctacaccatgtgggaattgaagatgagatttgggtggggacacagccaaaccatatcattctgcccctggcccttctaaatctcttgtcctcacatttcaaaaccaatcatgccttcccaacagtcccccaaagtcttaactcatttcaacattaactaaaaagttcacagtccaatatctcatctgaaacaaggcaagtcccttctgcctatgaacctgtaaaatcaaaagcaagttagttacttcttacatacaatggggatacaggcattgagtaaatacagccattccaaatgggagaaattggccaaaacaaaggggctacaggccccatgcaagtttgaaatccagtggggcagtcaaatcttaaagctccaaaatgatatattttgaccctgtgtctcacatccaggtcttgctgatgcaagaggtggattcccatggttttgggcagctccacttctgtggctttgcagggtacagcttccctcccagctgctttcacaggctggtgttgggtgtctgtggcttttccaggtgcacggtgcaagctgtcagtggatctattattctggggtctggaggacggtgatcctcttctcacagctccaataggcagtgccctagtagggactctgtgtgggggctctgaccccacatttcccttctgcactgccttagcagaggttttccatgagagccccaccctggcagcaaacttctgcctggacatccaggcatttccatacatcctctgaaatataggtggaggttcctaaaccccaatttttgacttctgtgcacttgcaggctcaacaccacatggaaggtgccaaggcttgaggcttgcaccctctgaagccacagcccgagctctatattggcccctttcagccatggcaggagtggctgggactcggcactaagtcgccagactgcacacagcatggggagcctgggcctggcccatgaaaccactttttcctctgaggcctcctggcctgtggtggaaggggctaccatgaagacttctgacatgccctggagacattttccccattgtctcggtgattagcattaggctctttgttacttatgcaaatttctgtacagggcttgaatttcttctcagagatgagttttcttttctattgcattgtgaggctgcaaattttcggaacttttatgctctgcttcccttataaaactgaatgactttaacagcatccaagtcatctcttgaatgctttgctgcttagaaatttcttccatcagataccctaaatcatctctctcaagttcaaagttccacaaatctctagggyaggggcaaaatgccaccagtctctttgctaaaatatataaagactcagctttgctccagctcccaataagttcctcatttccatctgagaccacctcagcctagaatttgttgcccatgtcactatcaayatttttgtcaaagccattcaacaagtctctaggaagttctaaactttcccacatttttctctcttcttctgagccctccaaattgttctaacatttgtctgttacccagttccaaagttgcttccacatttttggatatcttttcagcagtgctccactctactggtaccaatttactatattagtttgttttcatgctgctaataaagacatacctgagactgggcagtttacaaaagaaagaggtttaggccaggtgtggtggctcacacctgtaatcccagcactttgagaggytgaagtgggcagatcacctgaggtcaggagttcgagacctgcctggccaacatggtgagaccccatctctactaaaaatacaaaattagctgggtgcagtggtgcatgcctgtaatcccagctacttgggaggyaggagaataacttgaacccgggaggtggagattgcggtgagctgacatcgtgccactgcactccggcctgggcaaaaagagcaaaaytccatttcaaaaaaaaaaagtttaatggacttacagttccatgtggctggagtggctccacaatcatggtggaaggtgaaaggcaaaaggcatgtctcatatggcagcagacaagagaagagagcttgtgcagggaaattcccctttttaaaaccatcagatcttgtgagagttattcactatcacgagaacagcagaggaaagacacacccctgtgattcaattacttcccactgggtccctcccacaacacgtgcaaattcaagatgacatttgggtggggacatagccaaggcatatcatatagtatgtactcctttttgtctgccttattttgctcagcatgtttttatgattcattcacattgttgtgtctaccagtaagtagttcattctttttttaactcttgacataatttttttttttaattactttagaccgcggccaggcgcggtggctcacgcctataatcccaacactttgggagaccgaggcaggcagatcacaaggtcaggagatcgagaccatcctggctaacacagtgaaaccctgtctctactaaaaaaatacaaaaattagccgggcgtggtggcgggcgcctgtaccgagtcccagctactcaggaggctgaggcaggagaatggcgtgaacctgggatgcagagcttacagtgagccgagatcgcgccactgtgcactccagcttgggtgacagagtgagattccgtctcaaaaaaaaaagaaattactttagacctacagaagagctacaaaaataatttagagagttctcctttcccctctcctatggtaacatcttgcttgaccatagtacaattataaaaactgagaaattaacaccagtacagtattattagttgaactatggactttgttttttatcagtttttccactaatgtcatctttttattctaggatccagtcccgaatcgcatattgcatttagttgtcttatctccttagtctcttctaatctgtgattgttcctaagtcttctctttcattgctatgacacttttttttttttttcgagatgaagttttgctcttgttrcccaggctggagtgcaatagtgcagtcttggctcactgcaacctccgcctcccaggttcaagcaattcttgtgcctcggcctcccaagtagctggggttacaggcatgcatcaccacacccagctaatttcttgtatttagtagagatagggtttcaccgtgttggtcaggctggtctcgaactcctgacttcagatgatccacccgcctcagcctcccaaagtgctgggattacaggcatgagccaccatgcctggccaatacttttttaaaaaataattttttttttctcttttgagacagtgtctcactctgttgcccaggctggagtgcagtggtgcaatcatggttcattgcagccttaacctcccagacttaggtgatcctcccatttcagcttcccaagtagctggagatacaggtgcaagccaccatgcccagataactttttcattgtttagtagtgacagggtttcaccatgtcactcagactggtctggaacttctgggctcaagcgatctacctgccttggcctcccaaagtgctgagactacaggtgtgagccactgcacccggccttgctttgagacttttaaagagtactggctaggtattttgtagaatgttccacaacgtgggtttgtctgctttgtggttcatagaaagcaccttctagctgtgtccttatgtggtagaagtagtaaggggtctctcttaggcctcttttataagggcactaatcccattcacaagtgctccgcctttataaaagaggacaccaatcacttcccagaagcatcacttcctgacaccatcacattgatgattatatttcagcatatgaactttaaaggacacaaatattgagaccatagaatgaactataaaactatctgtctagcataatctatgaattggctattctggcaaacagtattttgagtgatatataattaccttacagcatagatagattactagttttcagagttagaatgtagtgaaattcttagaatacagtgatcctaggattgatgcttctgaagtgtctgcataggacatcacatgtcaaacataacatctcaaagtcgtgttttggaatggtgtgttcattgagaggtggttgttggctcatgatccttatcacactgtaaatttgcctaaatttgttctgaggaaacagctacatagggtttcctcaaagttcttttttcttgttttcaaatgtgggaaatacatatgacttctttttggaaaggatgggggttgggatttagtcttggcaaattgagatattttcataaggaaactctgtttttggtcttcctgaagatggctacagaagaccttctttggggagaggggttttttgatttttcagctttttaatggttcctattaatagataagaaaatttactttgaataatgatgttttgagaatcctgttttttatgttaaatgctggagttgatagaattagtggtaaataattatttaaaactttgatgtcactaatgaatgaggaagagggtaactgaagcaaaaatatatatgtggactgtaggaatgttaagctgaatatataataattctaaacttgtaaacttctaatttttcttttttttttttttaatttttattttttttttaaatttatttttttattgataattcttgggtgtttctcacagagggggatttggcagggtcatgggacaatagtggagggaaggtcagcagataaacaagtgaacaaaggtctctggttttcctaggcagaggaccctgcggccttccgcagtgtttgtgtccctgattacttgagattagggatttgtgatgactcttaacgagcatgctgccttcaagcatctgtttaacaaagcacatcttgcaccgcccttaatccatttaaccctgagtggacacagcgcatgtttcagagagcacagggttgggggtaaggtcacagatcaacaggatcccaaggcagaggaatttttcttagtgcagaacaaaatgaaaagtctcccatgtctacttctttctacacagacacggtaaccacccgatttctcaatcttttccccannnnnnnnnnnnnnnnnnnnnnnnnnnnnnnnnnnnnnnnnnnnnnnnnnnnnnnnnnnnnnnnnnnnnnnnnnnnnnnnnnnnnnnnnnnnnnnnnnnnnnnnnnnnnnnnnnnnnnnnnnnnnnnnnnnnnnnnnnnnnnnnnnnnnnnnnnnnnnnnnnnnnnnnnnnnnnnnnnnnnnnnnnnnnnnnnnnnnnnnnnnnnnnnnnnnnnnnnnnnnnnnnnnnnnnnnnnnnnnnnnnnnnnnnnnnnnnnnnnnnnnnnnnnnnnnnnnnnnnnnnnnnnnnnnnnnnnnnnnnnnnnnnnnnnnnnnnnnnnnnnnnnnnnnnnnnnnnnnnnnnnnnnnnnnnnnnnnnnnnnnnnnnnnnnnnnnnnnnnnnnnnnnnnnnnnnnnnnnnnnnnnnnnnnnnnnnnnnnnnnnnnnnnnnnnnnnnnnnnnnnnnnnnnnnnnnnnnnnnnnnnnnnnnnnnnnnnnnnnnnnnnnnnnnnnnnnnnnnnnnnnnnnnnnnnnnnnnnnnnnnnnnnnnnnnnnnnnnnnnnnnnnnnnnnnnnnnnnnnnnnnnnnnnnnnnnnnnnnnnnnnnnnnnnnnnnnnnnnnnnnnnnnnnnnnnnnnnnnnnnnnnnnnnnnnnnnnnnnnnnnnnnnnnnnnnnnnnnnnnnnnnnnnnnnnnnnnnnnnnnnnnnnnnnnnnnnnnnnnnnnnnnnnnnnnnnnnnnnnnnnnnnnnnnnnnnnnnnnnnnnnnnnnnnnnnnnnnnnnnnnnnnnnnnnnnnnnnnnnnnnnnnnnnnnnnnnnnnnnnnnnnnnnnnnnnnnnnnnnnnnnnnnnnnnnnnnnnnnnnnnnnnnnnnnnnnnnnnnnnnnnnnnnnnnnnnnnnnnnnnnnnnnnnnnnnnnnnnnnnnnnnnnnnnnnnnnnnnnnnnnnnnnnnnnnnnnnnnnnnnnnnnnnnnnnnnnnnnnnnnnnnnnnnnnnnnnnnnnnnnnnnnnnnnnnnnnnnnnnnnnnnnnnnnnnnnnnnnnnnnnnnnnnnnnnnnnnnnnnnnnnnnnnnnnnnnnnnnnnnnnnnnnnnnnnnnnnnnnnnnnnnnnnnnnnnnnnnnnnnnnnnnnnnnnnnnnnnnnnnnnnnnnnnnnnnnnnnnnnnnnnnnnnnnnnnnnnnnnnnnnnnnnnnnnnnnnnnnnnnnnnnnnnnnnnnnnnnnnnnnnnnnnnnnnnnnnnnnnnnnnnnnnnnnnnnnnnnnnnnnnnnnnnnnnnnnnnnnnnnnnnnnnnnnnnnnnnnnnnnnnnnnnnnnnnnnnnnnnnnnnnnnnnnnnnnnnnnnnnnnnnnnnnnnnnnnnnnnnnnnnnnnnnnnnnnnnnnnnnnnnnnnnnnnnnnnnnnnnnnnnnnnnnnnnnnnnnnnnnnnnnnnnnnnnnnnnnnnnnnnnnnnnnnnnnnnnnnnnnnnnnnnnnnnnnnnnnnnnnnnnnnnnnnnnnnnnnnnnnnnnnnnnnnnnnnnnnnnnnnnnnnnnnnnnnnnnnnnnnnnnnnnnnnnnnnnnnnnnnnnnnnnnnnnnnnnnnnnnnnnnnnnnnnnnnnnnnnnnnnnnnnnnnnnnnnnnnnnnnnnnnnnnnnnnnnnnnnnnnnnnnnnnnnnnnnnnnnnnnnnnnnnnnnnnnnnnnnnnnnnnnnnnnnnnnnnnnnnnnnnnnnnnnnnnnnnnnnnnnnnnnnnnnnnnnnnnnnnnnnnnnnnnnnnnnnnnnnnnnnnnnnnnnnnnnnnnnnnnnnnnnnnnnnnnnnnnnnnnnnnnnnnnnnnnnnnnnnnnnnnnnnnnnnnnnnnnnnnnnnnnnnnnnnnnnnnnnnnnnnnnnnnnnnnnnnnnnnnnnnnnnnnnnnnnnnnnnnnnnnnnnnnnnnnnnnnnnnnnnnnnnnnnnnnnnnnnnnnnnnnnnnnnagaccggcccggccaacacagcgaaaccccgtctccaccaaaaccagtcaggcgtggcggcgcgtgcctgcaatggcaggcactcggcaggctgaggcaggagaatcaggcagggaggttgcagtgagccgagatggcagcagtacagtccagcttcggctccgcatgagagggagaccgtggggagagggagacagagggagagggagagggagagggagagggagagaccggatcattttaaatacagtttttgtttgtttgtttttgcagggggtgggtatgggtacagtggttcactcctgtaatcccagcactttgggaggctgaggcgggaggataacctgaggtcaggagttccagaccagcctggcaaaaccccatctctaccaaaaaatataaaaattagccaggtgtaggccgggcgcggtggctcacgcctgtaatcccagcaccttgggaggccgaggcgggcggatcacaaggtcaggagatcgagaccatcctggccaacacagtgaaaccccgtctctctaaacttctaatttttcaaaagttaatgatacggattttgctaaaggtgttactgggtactgtgggagagttggttgttgggagtttgttgagagttgagagtagtttgttaaaagagaaattgatggcctttcttgtattaaaatgtttcttattttgcttacagtttggtaatcatttggtaatcatttatttccccaatgaagtgtgtcacatagtgttcagtaacataatccattctgatgggagcttcattatcttcatctcatctaaatgccagcctaatgccacaaatatttttcagagaagattcctttatcaccaattatccccataattgaagccagctgtgtatcggtttatttgcaggatttctatgtaagactaacatttgtatatagaacagaacaaaatatgcaaaaatcttgtttattgacaaaagtaattttgcctggttgtcttgaacctaaatcagtattaatcctgaatctactacccatagaatgccagtatttgtatttagctccttatgtctgtattgttgtagattaacactttatttatctaatgagattatgtacattaattatgctttaactacagttaacccttgaataatacagcagctaaaggcactggctcccatgcaatcgaaaacctcaactctccccactggctgaggcaggtggattgcttgaagccaggagtttgagaccagcctggggaacctaatgagaccctgtctctataaaaacttctcagaaattacccagacatgatggtatgtgtagttccagctacttgggagactgagatgggaggatcacttgagcccaggagtttgaggtttcagtgagctgtggtcatgccactgcactccctcctgggtgatacatcaagaccttgtctccaaaaaaataaaaataaaaaatccgcatataagtggacctgtgcagttcaaacmcgcattattcaagtcagctgtagtttgtctgtcgagtacagatgagtttatatatgaaagtcatgtttagaatctagatagtactgaatcatatgtgttagctttaccactggccaagagtggactatgtttttttgtttgttttttagttttttagacggagtctcgctctgtcacccaggctgcagtgcagtggcatgatctctgctcactgcaacctccgccttccaggttcaagcgattcttctgcctcagcctcctgagtagctgggactacaggcatgcaccaccgcgccctgttaatttttgtattttttgtagagatagggtttcaccatattgacsaggctggtctcgaactcctgaccttgtgatctgcccaccttggcctcccaaagtgctgggattacagatgtgagccactgcatccggccaactatgttttatataaaaaatacctgccaagcctatttacaattcctctttcaccccaaattactttagcgacgttctttgcacatgatatgtatcaggatttggccctttgcattttgacttcctctgcgggtatgtgtttttcttttcccttttttcgaggcctctttctcccttaattagacctgtcgggtgctctagtttcctaatttattaagttgccctcatgtatatactttctataccccaggtttttcatttgtggtccttatctgagcacacagtcttttttagcctttttatggttaagtgacctacacagatgagtcaggctaaccccaggacaaaacaagcttaaaaagatcttgaaagccaatctaagattaggtctttggacctgggacagagcaagaaagttgtttttaatcaaactatgcactctccacaaaatgaagggactaatctatactatttctgaatttggtttctttggttttatttgcatagacaactgctaaaagtgttatattgctgaatttgttgttaccaacagtggacaatggagtgaaaatagaaaacagaattggtaaatttcaggctgttcagtgcttgttttttttcaaatggcaaataggcataaacagactagtgatttccattagtattgttacttagttttataatactaaatccagaaatctagttctgaggcttcaaatgagaaattcttttccgagtaaatgagtgacataaagtccttaacattayctcctcgtggttacagatcagcatctgacagactgctaatctgcaaaatgtggtttcttcaagaagcagaatgctagccagcagctgttaagtgagagtaatctgagtgtaagaagtgatttttttttctttccatcatctttccacgccaccacaatggtgcacatgaacgacttggctgatgccctcaagagcatcagcaatgtcgaaaagacaggcaaacgccaggttcttactaggctgtgctccaaagtcattgtctttttttttttttttaactgtgacaatgaagcatggttccattggcgaatttgaaatcattgatgatcacagagctgggaaaattgtagtgaacctcacaggcaggctaaacaggtgtggagggatgagtcccagatttgatgtgcaactcaaagatctagaaaaatggtagagtaatctgcttccatcctgccagtttggtttcattgtactaactatctcagctgacatcatagaccgtgaagaagcaagacgaaaatgcacaggagggaaaatcgtaggattctttttctagagatgtaatacatatttacaaataaaatgcctcatggaaaacaaaaagttattttttaaaaaaagggagaataatcctttttctgttaaattatattaaatatattaattatattaaatataattacattaaatttaattattattaaattatatattaatattaaatataagtcccatacattccaactttagacctagtcttacttttatccttactctagaggttatgtggttggtggaaaaaaacctcatggtgtggtagacctgggttggatcccagctctgccttgtactagctcttgaccaccagcattgttacttaacctatgtctcagtttcttcatttaatttttttaaaaggtggggggaggggcggtgtggcagggataaacttttggtgtaaggtttaattgcagtagtgtacatgaaatgactagtgcagtgactagtgcactctttgtctgactggtgataccaaggtattaatatactgaaacttgagctgaaagggaaaaaatctgaggaataaggagaaaaataccaatattgaccttatttacacttctatatattatggaaaaacctggcttgcttggtagatggcagtggaatatttaatgctcttttctgtgtgtttaagtattgcaaatgatcatgaacttaatagaaagttaaagctcttttttgagcagctgaatgacagggtattttggcaacagagcatgtttccatgagcatgtttaccagtgtgctgaaggaaatagattttggacaacaggtccttctttaaattaaaaaaaaaaaattctttatgacagaggtgtcattatgcttctaatagatgcaaggagagttacttgcctttttgaaacaataagaaaggaagaaatagttaatgtttgcagttgcacgaaagagtaaatgtggtaaatttcatgaagttaacacaaaaattatacatrtagaattattaaatttccagaagtcttaaccccaaggaagactagagcaacataatggtagaaagtggggggatgagttgttaatatttatttaagcccttcacaaatatagagtgactcttggtttaggattatgaaactatagtatttctaacttggctyactggctcatttgggaaatcataatgactttttttttccccccccaatttcgaaggcttgagttttttggctctcttgtgactcctggtgcttggaaatccggaaggaggtacattccagtttttttccagctccagcactttagattctgagccgtttcagtaaatccagcaataagctccttatttctgttatttcagaatcagtggataccatggctagtgtccactccttcgcatttctctgagaaattttcaggaagatagaaatgaacatttattaaacgtactagaaaatgtactttatgtacaaygtaccttttaatccttaccacagcctgctgaggtagggattactagcaacattgtacaaaaataaggccaggcatgattgctcacaggggtaatcccagtgctttgggaggctgtgagcccttgagcccaggagttcgagatccctctgtgcaacatagtgagacctcatctctacaaaaaataaagattaccagggtgtggtacagcaaaccaccatagcacatgtttacctgtgtaacaaacctgcacatcctgcacgtataccctggaacttaggaaaaaaaaaatattagcagtgtgtggtagtgcatgcctgtagtcccagctacttgggaagcagagggaggaggatggtgttagccaaggagtttgaggttttggtgagttgtgattgtgcctctatcctgggctatagaacaagaccctgtctcaaacaaaaagtcaaaaaataaaaaaggctactaagtcaacagataagatgacttatatgtagtgtaggggaaagaaatatctttccttcccatcttaggttcatggttgcggcccctataagaaaagacagattagtgagagaaaagcatacagatttatttaatgtaagttttatgggacacaggagccttcataaggaaatgaagacctggagaaatgagtaaacctgtgtgttttctatgacaggattgataaagaagtggatagttgtagagaagtatggttggacaaaagggggtatgatctaatggtgataaactgggaggaacttagtaagctctgttcattcagattctttgctgcgtccctgggtcttcagaggtaaggatgttcctttcctcgtggtataaggatgacacctctcaaatgagagtagtatgacctgctttaggggaaggtgagaaaaattcttcctagattttatgacttccttcagggaagaagtcgggaggtgagagtgaccttcctgcttctgctgttttctcaaatgcccaggtatcatattttgggttcagatgtcctaaatcctatcagtaactagcaacagatttgttaaaactcatagctggaatttaaactcaggtcagtttctatttctcatgctgctcccagctttcagaacagaaattatccagtaactctagatgagatatcaataagagacaaaaacccataaacaaagaagatcatccttaattttttccccccaaatgaaaaccctgcctggggcaaaactgcatgtttcttttgcagttgaattgtaatcttccatctttagaatacagatagaaactgtgttaaaacacagtttttcttttgcttaatttttagaaataatcttaaagcttcgttaagcctcaggattactatataagtactgtattagaaatgttgttagaattattattattttgagacagagtcttgccctgtcacctaggtgggagtgcagtggggtgatctcggctcactacaaccccctcctcccggattcaagcgattctggcgcctcagtctcccaagtagctgggattacaggcgtctgccaccacgcctggctaatttttgtatttttagtagagacagggttggccaggctggtccaggctggtcttgaactactgacctcaggtgatctgccctcctcagcctcctaaaatgctgggattacaggcttgagccatcgtgcctggccgagaattctaaaattaaatagtgcatttttttctcaattaaaaaatcttagggggattggaaatacattttaggtccctctcttttgaatttttctgccctcccctcctttctaggccatatcattagcctctggggagttatcccaaacctaagcacttggcattaacaaacctcaagtgtgggagaggtgatgaataaagctgttaagagtaccggggaagaaattaagagaaactagcctgtggtgtcagtaaatcagagcattatcttgctactagcagaggcatctcaggacctttgatccctgtcctctcgaacatagtagatgcactctgatcttgttttattgttattggaatggactcaactcacttgacatttaagtgaacattttttggatggtgtgtttacttggactagagtccagggccctcatcatgtttctgtcagcaattgtatatcctcaccaaacttactggcattggaggtgcttaaatgagtgagaaaaactatttaaagcaagaaatattatgcagtattggtgtattgtcactacaggcatctcaagtccagcattaaaaaaatttatggtaaaatatatagaatataatrttaccattttaaaccattttcaagtatacaattcaatggcattaagcacattcacaaagttgcacaatgctcaccactatccatttccagaactttttcatcatcccaaacagaaactccatacccattaagcaataactccccattccctccacccctcagttgstagtaacctctaatttattttgtctctatgaatttgtctgttataggtatttcataaaagtgaaattatacaatacttgttttgtgtctggcttatttyttttagcatattttttaaatttgtccatgttatagcatatattactttttgagactgaataatattctactgtaggtatatacatttgtttatctgttcatctgttgatggacatggggattgtctccaccttttggctattatgaataggctgctgtgaacattggtatttaagcatctgtttgagttcctgcttcctgctttcagttgttttgggtatatacccaggaatggaattgctggatcataacgtaaatctatgtttagctttttaaagaactgccaaactgttctctatagtggctgtaacatcttacatccccaccagcaatacatgaatgagagttccagtttcttcacatcttggcaatacttattttcaggttttttgttgttgtttgataatactcattctactgggtgtgaagttacggtatcttatggttttgatttcatgtttctctaatggctggtgatattaagcatcatttcatgtgtttatttagtcagttatataacttctttggagaaatatcagttttttaaaattaggtttttaaaataactgtggagttacacattctgcatattaatctttatatattctggatattaatccctcatcagatacacaatttgcaaatattgtctctcattctgtgggttttcttttccctctcttgatcatggcttttgaggcacaaaagtttttaattttgaagtccagtttatctgtttttttcttttgttgccagtgctttttgctgtcatagctgtgaaatcattcccaaatccaatataaggaagattttctgccatgttttcttctaagagttttatagttttaactcctacatttaggtctttgatccattttgagtttacttcttttcttttcttcctttttttttttygaaacaggttctcacactgtcatccaggctggagtgcagtggtgtgatctcagctcactgcaacctctgcctcccaggctcaagtgattctcccatttcagcctcccaagtagctgggactataggctcgtgccatcatgcctggctaatttttttattttttgtagaaatggggtttcaccatgttgcccaggctggtctctaattcctggactcaagcagtccaccagcctcagccttccagagtgctgggattacaggcatgagactgcaactggccacgccttttttttgtttaatgaaaccaatgacaatgtaaaagtctgtgctttagcatttcttcttaaagaacgatgaaactctttgatgaattaagatggaagattagctgagctgaacttactattgatagcgtgtaaactggttgcatctatttggagttcttactgtgasgagaggtctctgaaaggaatgtatttgttgaaaagtctttggtacaaaacaagaaaggtaacctttatcaaaaagaccaaagaaattctcattgtcctaggtcatgaaataatactcagggcatcctcctcacaacttggaaaatatagaacttgtgcattacctcatcccactggcttccagattatatgtgcaagagatatttgtgtgagggaatgagcacttctaagtcagtgaaagctaccaacctgtatataccctctgacttttttttggagacaaaattttgctcttgttgcccaggctggagtacaatggcgcgatctcagctcaccgcaacctctgcctcctgrattcaaatgattctcctgcctcagcctcctgagtagctgggatttcaggcatgtgccaccatgcctggctaattttgtatttttagtagagatggggtttctccatgttggtcaggctggtcttgaactccccatctcaggtgatccacccatcttggcttcccaaagtactgggattacaggtgtgagccactgtgcccggccctctgacttattcttgagagatttatcagtttgtgaatggatcaaaagcatacaactgaaaattaaagaacagaaaaatagatgtagtttgacttactacatcttaaaaatgcattcatgatctcccttagtgatcttttttcttaagagtttttggactcttgccctcccccacaaatagggtagaataagagaataagctgagtatttaaactagggtaacagataaaaagaaaaaaaaaattccctctccaaaaagagatgatcccttaaaaaacaaacaaacaaaaaagataattgtggttaataaaattaataaaaataaattagaaaacattcataaaactaaacaaagtaaaaatctaatcagaatatatcataaggactcaacccctaaaggagatttgtgaagatgaaatgtgatgattttgtccaggcatggtggcttattcctgtaattaatgccagcactttgggaggccgaggcagatggattgcttgcacctaggagtccaggaccagcctgagcaacataacaaaaccgcatctctacaaaaaatgcaaaaattagttgagcgtggtgcacgtctgtaatcccagctactctggaggctgaggtgggagaattgcttgatcctgggaggcggaggttgcagtgagctgagattgtgccactgcacttcagcctgggctacagaatgagacctatccaaaaaaaaaaaaaaaaaggaaaagaaatatgataatttcatgctagattcattgaattgtatcaatgttctgattagactaaactgaacttgacaaggcctatggtgaatagatttacatagctgktaggttcattatttatagttttaactatgaagcaataaatgatgaatagactataaagactactgttatataggatttatactttactttttttccaaaagggatttgaggtgacttgcaaaattaagcacatataaaatgggtcaaaagactaattttttaaaataaagcacataagaaaatatgcttccaaatagatattatccttcatatagtcaccttattaaggaaaacttactccaatattgctttcttagacattttaggaattcttttggaattgttttcagagccagcttataaactcaaaacctgctttattgttctacatagtcatactttttttttttaaacccagctcgttttccccatttattcattagttgctccgaataaccctcacctcaattaaattcatcacctgttgaggaacaaacatgtgccaccagggaggatatctagaataatgtgctgtagacgctaaaagtaattttaaaataagaattttcaatgttttgagtagtggttgcaatactagaataaatacatattgcttctggataaatacaattgcttctgcatattgtttgttgttgttgttgttttgagacaggttcttgctctgtcacccaggctgcagcacagtggtgcaattgtagtttactataaccttgaactactgggctcaagtgatcctcttacctcaaactcctgaatagcaaggactataggtgtatgccaccatggctggctaatttttaaattttctgtagagagggggccttgctgtgttgcccagttggatcttgaactgctgggctcaagcagtcctcctaccccagcccccaaaagtgctgagactgttaagtgtgagccatcacgcccagcctggtagtgattgttttgaatgggtgaaggctcatttcgatgtgtaagttctattatgtttgtttttaacagatattattactcatrtctcataatacagtttgattattttcatttcagaattccatttttgtttctgttattttgagataattgtcttttagagagagacagcttattttggagcaaatccattgatcgttaggtaaaaatactcgtcatttgtagtttgtttctttaactgaactaagctttatttaaactaagctactttggtgtcgtcccttatttaaaaatttttctcagtggttacactgttttattttctttggcccaatatattacctatctcttgctctgattttccaagaatattaatacctaataataataccagtactatcttaccaaaagaacaatgctgttggtagaacaggttttctcattaaggctataatattgacaacatagtatagttacaatatttctgggctgggcatcgtgtttcatgactgtaattgcagtgctttgggcagccaaggcgagaggatcacttaaggccaggagttctagaccagcctgggcaatatggtgagaccccatctttaaaaaaaaaaaaaaattagccaggtgtggtggtggatgttggtaagccccagctactggggaggctgaggctgaggaggaggattgcttgagcctagtagtttgaggatacagtgagctatgatcatgctagggcattccagccaggatggcagagcaaaaaaaaaaaaaagaaaaaaaaaaaagaaaaaaatctgaagcagcccttaatttggaagcctcttctaactaattgctgataaaagacttcgagtattgcatggacctctaagtggggaggaaatttaagcagtaattaaaggaacaactcaactagttaataaaataattctgtatgtgtgatacataatacttgtgtacacttctgctatttaaaatattttatgaaagaacaatgttaaaactttctgatttgataaaatttattaagttgggtgagaataagttagggaagatggatgaaacaaaaatccaaaatagcaaaagttgttaaagctgtgtgatgtgtttaaagcagctcattacatatttcctctacttttgtatgtatgagtaaaaatatccttaataatattaaatttaaaaatcatgtggcagaaactaaaaaaataccaataaaatggtttttttaaaaaggcatttaaatgttaaggtcctttagtcttttcatttccatttgagatattatagtccttgttattttagctgctattatttttcttaaacttcagaatttcttacactaccttcctcaggaaataaagtactgtctacagtcaggcagtgtttttgaggtggtccctccatgttaggaaataatttaaaagaaataatacttcagtgcattatcttacttgtagatgaaaggcctttgtattcattgagataaacaccctcaatactattatttttagatatatatattacatatgaaatatatggcatattttaggtgtatattatttacttcttagacaactttttaatatatgagtctatacttagtttccaagctttgattccctttatgtcaagtctgtatcccagttaaagttttcactaatattaaattaatctctctgaattgcagtaatacttggtttgtttctagattaggaaatttaaaagattgcttaataaaacccatttcatctccattacatggtaagtgatagaaagaatcaattactagtgtttatgatctttacttttkattgccaattataaaagcattcaaatgtaggccagattttttgtgtgaataaatgtcatgtaataatattagtggcatcagtgaagttattaagatgaatttttcgctcccagcatccaggctattttcttttttttttattctggagacggagtcttgctctgtcacccaggcaagaatgcattggcacaatctcgactcactgcaacctccgcctccygggttcaagcaattctcctgcctcagcctcctgagtagctgggactacagatgcacactgccatgcccggctaatttttttgtattttagtagagacggggtttcactgtgttgcccaggcaggtctggaactcctgagctcaggtagtccacctgcctcggcctcccaaagtgctggggttataggcgtgagccaccgcgcccagccaaaggctattttcaacatgactaaacttgttttcagcatacttctaacataatagctacctttgattcattatctcctttctgcttacacattctctggatgtttgttttatcatgcagataatggccaatgaggaaaggacaaatgataatggaattaagttgtatagcaaagatttaggttaaaccttatgaataagacactaatactgtagttggttacctaagcagatcatgaggatgttgtgattctgtcactgggaacatttgttcggttttgataatctagtgaagaaatcagattcagacgattataggggtccacatcaagttaccacatagaggttcttttattttctgtttttaatccacttcctccgttttttcttgggatgaatagactgacagtattacccagaatactttatgttattaaagaatgaatgtatttccatctagatttccaattcattaagtacctaaattctatttatttccttaagactctttgaagaaggtagtcaaacacttcaattaaatgggatagataatgtatgtggaagtatatgacctaaagtataggctagaggtgcacactgttggcccatggacccaacttagaccacagaccatagtttggctgaaagagtttttgtttatttaattgggtcagtatttttatttttattttttatttatttatttatttttgagacagagtctcgctctgtcacccaggctggagtgcagtggcgtgatctcagctcactgcaacctccgcctccctggtaccagtgatacaggcacgtgccaccacgacaggtgtgcgccaccacactcggctaattttttttgttgttgtattttttagtagagacagggtttcaccatattggccaggctggtctcgaactccttacctcgtgatccgcccaccttggcctcccaaagtgctgggattacaggcgtgagccaccaagccggcctaattgggtcagtgttatacagttgagagactacaggtaaaagtctaggttggctgttatcacgcaattgggaacatttggctcccattccctcagggaagtcagctacacttgagtagccacttcctcctctagacaagatgtgcaccctcatgtatcccacttcacacattaattcacttgcctagtcttgacatagatgtttgtaatgtattagttgaatctgaatttcagagagttgtcaggtaaactttatagtaccttgagaaattggttataaaaatgagttatctgtataagcctgaataagtcagacataaatcatgcataggttttaagaagacttcctgggctggattgattggtcctctttttgtctctctatactttcttagtcatttgattagtcttagttattgatctcctaaaacttattataaatatctaaatgtatatcccctctaatatgccatgagctataagctctttcacggcccaggatcatacattattttgtttcttcttctcagcttctagtacctggtacactgtaggtatccaaatgtttgttaaattcttctaactttagtataggcatttgagtgctgtgatctgtttttatttttgaaaaaaaaaatattagctatttctgtttttgtattacaagcagctcctttggttaaagacgatttttaaaagttatttcaataattttcaatttttctgtcttaaattgaaaacagtactgaaaatacaagatatttgtaagtgttcagattctcagatggaatatttttgaagtaggtatttttttcattttatttaaaaatattcttctaatattcttagtattttttaaacaaataactcttaattaccatttaattttgcatttgcttgcaataaactgaaattggcagttgctcaaactccactttacttatttacacatctagttatttgggaatgtgttttactttgtattactaaaagtattgctatgatatctagctgttttaagtaaattaaaattgaggccattttaggaaatttgctttgaaaatttagaaagatatgaaaatatcttttttaggtcatttgtgatctcttaggttagagataggatttttgcctgtgtctatttaatgtgttaggaggattttcatatagttttggaaaatggaaaaaagtccttgggcatttgttyatatgataattggaaagatctcacttaaaattttctcagagaaaaatgtgcgttatcaccttttctagttagaggcttagagaaccaacatcatgtagcctacagctaaatagatgagcatgttgatgttgatcatwcttataacataaaagcaaatgactattcttgggtggttgggttgcatttttggttttcattgtgactgttggtagtgttgtaatgcttttaggacttttagacattgcatctggtcatttctgctcttcggttgagtaccccaaaaatccaagaattggaggagcccagtgacatgttttcaaaaacctaaatgtctctagggaaaatgactccctataaagttaaacataatgcatatctttaaagtgtcagtatatttaatggattatgtatcttcaactcagttattttactagactaggtagtttcttttaactttatagagtataaattggcttactaagggcagatttccactgacaatcaaaatttaaaaatttccttccattccaaatttagatatctggttagatttttagcagtgtgcagttgattctagtcatcttgataatgatgactagaatcttgataatgactaacctagtagttaggtataggtagactcagctaaaatgggtacttggaagcaagatgaggccactctggtatttgtatcctttattcagtctgtttcactacccatagtttaattttaaacaccatttgccagctgtattcagtttctatcgtgttagcctgaaatgtgctagagaaaataaactaagaccaatagacttatttttctgtttgtctttcgacttaacattttaggatcagacttggcttgtattccagactcagggtgccagaaaagtaaataatacacaataatacttaggcttatcttcaatacccttgttttgttatggccaattaggctaattttagtgatggtcagaggcttctaaattggagggcagtagtaactcctgtaaataccaatttccaaatggtatctctctgttccagcccatcacaacagttttaaaaccagcttttgtttttgtttttgttttgttttgttgctttttgttttttaacaggagagccagtgtaactccttcaagactggagtgacacacactgcatctgcatctgcctcatgtgagttctcattttggcagcagcactctgctaggctggaacctctgtagaggtttgccctttatttttctaaatctataaattactacatagtgtgtcttggtggcaatggtaaaaagtgcatgagaattccaaacttcyctgcagaaagttttctgctcattccaaagggactttgtcctttaatatgtattctatcttgtatgaacagcatctactcaamacagagcccacaactttcatcctgaaaacatagttattttttgaagaactgttttttccttgcagattatggagyaaagaatatctttaaatgctctcagtaacttcaactttcaaagcgttggttgttttctttatagtctaattatgtaacctgagaacactgtgtgctgtcctagtggctgaagcagtcctccttttgggactctagcccttaaaatagcttcttcctttgtcttccgatattgagtaactaggggtaggccagagtaccttctgggagaagaaataagcagatattgtgtgaagttatgtttactctgaagctattgcctgggttttggaaccacagaaagtcaattgtgagagttgagcttgaagctgtgcatcatttacttgccacagttgtgggagagaaattgaaattagagcctttgcagctgtggagaggcataaagctctaagtctgaggagatatatgtggtttcctataaatatctgaggctggctttgtagggcctggttgattaaaaaaggaattttattttttatattttacttttatttttaaaggaatggcagtacttagcttcaggaatttttgccaccaggtcacaataaatatgtttatcactgagggacacttagaataaaacatctaaattcatgctctgtgtggctgcaattctgcgtctccaaccttggttgtactatatagcagataatttaatgaccaaggagtttgtgttgctgaaatgattatctgggaaaatcatttgtgattatctgggaaaactgacattttctcataagcttgtaggtcttactgattaatagagcttgatgaaatagtgttgtcagggtagaacttggactctctttattaaatccattcccacttgtgagtagagcagtttattttggactagttgaaaaaaattggagggagaagtgtatgtttcaacacccaagcttaagttttgatggcttatgtaatctagaaattcactttttgcagtggtagtatatataccctatcacaaagagcttttgtttgtttgytttttgagatgaagtctcactctgttgcccagactggagtgcagtggtgcagtcttggatcactgcaacctccgcctcctgggttcaagcatttctcctgcctcagcctcctaagtagctgggactgcaggtgcgagccaccacgcccagctaatttttgtgtttttagtagagacggggtttcgccatattggccagggtggtctcaaactcctgacctcaagtgatccacacgccccggcctcccaaagtgctgggattacaggtgtaagtgctgggattacaggtgtgagttaccactcctggccttacaaagagcttttggagactcaaagagacctaaattttggcttcagctgatgtttgtacttgctatataacttcacgtcagcaaatggggaagatatatcatatttttaggaagtactctgagttcattgagaaaaaggaaatttaaagtatttccataggtggaatttctagaaagtcacttcggttgaacacttgggaaattctgccctgccaataaatataatgtggcaagtatagtgtttttattttctgctattctaggatttgtgctgtcaaaatggggatttgagactttttctctcctgtattgtttttcactgaaaattatgagtacattaatttgtgcttcaaatccaaattgtctcatagacataggttttactcgatagtcactccattgctctatagttacctaatttctctagctggagaaattgctgatttaggggtgagtrtgggtgggagtaattaaggtttgttttttgtctcccactcttaaggcatatccagcaaattgtccttctgaaaaaattaacaattgaaaacattttatatggaccaaatcctgtaagaataaatgtcagtagattacccaaattacttagctatactggaactttatttcattaaatacagtttgaaataaatggggccttggttaggattgagaaataatttttgttttatggagattgtactaaaatgagatttacttgcaactggggtgggagcatggggcattgaggagggtaaggtgagagtggttatacttataacaaatttacaacagtaggtgccatgccttatggttttatgatacaccagctcttactctattagtgtatatagcactttatttttttatccacagtgtacatcatatagatttaggaattccacacttaagtcttcaacaagttttttttagggggatgggagaggatgaggcaggatttaaggggaagaaggtaatatagccagttttgaaaatgttagccatggctgggcatggtggctcagcctgtaatagcagcactttgggagcccgaggcaggcggatcacttgaggtcaggagttcgagaccagcctggccaacatggtgaaacccccgtctcaactaaaaataccaggtgtggtggcgggcacctgtaatcccagctacttgggaggctgagtcatgagaatcgcttgaatctgggaggcagaggttgcagtgagtcaagatcacggccactgcactccagcctgggcaatggagcgagactctgactcagaaaaaaagaaaaagaaaaagaaaaaaaaaagttagccagggttagcattggcattaaattattattacccttgtgacaacaaaagaaataaagatggtttttttcttttggcattgttctgatgagactcaaaagaccttaaaaggcttctggttttaaaatctgacaaatatttattaaaggattttgaaagcccagcttgctttttaaaaacttcagtttaattttaaaaatagatatacattaatgtaagttttaaaggtacaagaagtacatgacagtttccttccctgtctcttaaaggccactcagttcctttcctacgtggcaactagtattactgttatatatttccagaaatattctaaaggattgtttttggaaagggaaagttgaatcacactcattaaagtattagcaccaacttggataggtagactaattgcaatgaaaaatcagtttgcgccaaaagctaaagatgttaatagtagatggaagaactataataataatagttgcattattatgagattacaagaataggatggatatttttgcctcatttggcatttagcaagctagcaggtctttttagctgttatttttaatatggcttactcactcctggagactgatggaaagatgcttacctaaatatttcatttggaagaaacctatttaaaggagcaacattttcttttcttttcttttttttctttttgagacagtctcactctgtcgccaaggctggagtgtagtggcacggtctcggctcactgcagcctccacctcctgggttcaagcgattctcctgcctcaccctcccgagtagctgggattacaggtgcccgccacaacgtccaactaatttttgtgtttttagtagagacggggtttcactgtgttggccaggctggtctggaactcctgacctcaagtgatccgcccgccttgggctcccaaagtgctgggattacaggcgtgagccaccgcacctggccgcaacattttctttctgcttgaatttcagtagtaaactctgaaaagttttttcattatggaaaatttcagacttacacaatagagagagaacccctcattgcctgaaatccctgttatttgacctgtaacaaactcaatgctcctttggcagataaggagagatttagttttatatacacatttgcatattttttttttttagacagagtctcgctctgtcacccaggctggagtgcagtggcatgatctcagttcactgcaacctctgcctctcaggttcaagcgattctcccacctcagcctcctagctgggacaacaggcatgcgccaccacacccggctaattttttgtatttttaatagagacgggggtttcaccatgttggtcaggctggtctcgaactcttcacctcaagtgatctgcccgcctcggcttctcaaagtgctggaactacaggcatgagccaccacgcctgaccaattcttcaatatctaactccatttcatatttagatttccctaattgtcacaaacatgtctttttatggttggtttacaataataacctgcaaaatacaattttgatggcatacattgttagagctgataagaaaacagttaatctaacaagtggaacaaatatgttgattggagaaggcatataaagcaaytacccaagccaaacaggaattccaaaaataaattattttaaaagttcattttgaaggatttctgcaacaattatgcacaacaccgaagccttcarcatacatagacctcccttacctagttttctgtgtacttttattctcacgattaatatcacagctatgcatattcatttttttaaactgtgggaatgaaagaataaaggaaaaaaaagtttggaataggtttcctgagaatgaaggaactatactgaataatttgataattcagcttgttgctgtgctcctgctatataatatgacctatttccacagactaacaattgagttctctaattacttggggcaatacagaacatggagtttgagggggaagaagaaaaatggcagaattaggaggggggaagaactgggaaagagcagaaattcattcatttgcattctgttttaattggctgttctttctgctaactaatgaaaacctcctctttgtgcagtgtacaagtccccagagtatgagtcccttggttttgagcttactgtggagagattagtttctattggctatccccaggagttgctcagctttgcttatgattctacattccctaccaggtaatttttaaagatatttttggattaagactagattaagactactttccttacccctcaaattagacattccagatttatccttaacaaaaaaaccccccaaaacattgaataattctttgttgtttttttggttggttgatgttgattctaaaattaccatgaactttccatatacaccatatcttggtgttcctgaattaagctcagtttattgcaactgaggaagacccacttacaggtaaaaaaggagattactaaaactgatgggcagtaatcacagrtggtgctatttggggctgttggcaaataggtacgtgtttctctaatacacttaacatgatagaagcttggcagtttccatttctggatttgatagggaatatttaagattaagaaaatgatgtttgagatgctatcatatatatcccacatacagcatctaatggagaaaaatataagccttctcagttgtccaagaaaaaagactatgttttagaatggtaccagctgtgtagtaagaagaatgttttttataccttgtttgattaagcacttattccttacagaaaacaattatgattttctgtctggacggagtcaatattttttagttgctttagaattagtttttaagattttactcactttagctatattaggacatactttgagttggtacaaagcttgaattaaatgaggttggttcatgatgattaaatactactacataaaattattgcctgtattactttgcattatcaataatgtcttcattttcacataggggacttgtctttgacacactgtatggaaatcttttgaaagtcgatgcctatggaaacctcttggtctgtgcacatggatttaactttataagggggtgagtacagagaacctttagcctctttctaatgttaaagtcaaacaatgtgaagatgacatcatctccccagatgtaatatatttccctattacttttcatcattaaagagcaaattcccttacataaggttagttaacagttatttattaggcagttggaacccaaactgacatatagttagcaattacattttgtttaaattaagtgccttccaattatacagcatacaacaaaactaatcttaaaacttgcccagaagaactttagtagttttgacttatttgaaattctaagatttttattttcttctttctaatacagttctcaggtagctgttcagaagaggtatgtatataaaaatgctttgaaaaaattttaaactatagcaatttaaatgattaagagatttttaatagccaatacgttttttagattctaatgaatctaaactttgaatcctgacatttgattgtgtcattaaaaaaatgtaaacataaggttaaagtgaatatgtgctaataatattttaaacaaataagaataagctttattttcaaaataaaaatatttccactattgtcactaatttgaactttttaccctagtaaacagcagatgaaatttagtatctactatttttttgtgaaatgtcccratattttcaaatcataatgccacaatttgacaacttctgtagctatagctttactgttatacattttctctactgttatgccaccttatttactattgacattgtattaaggtcagaacaacagctcgtaaaaccagaataggatgtgtgtcagtctcttatgtaacttttccatttactattcattcttgatggcagaataggaaaaacaccaggctacattgaaatgtttaaaaagacaatgtctttttttgtgataagaggcacaaaccaactgtaattgtaccagagcttcctttagatttgaggtcacaggatgccccttagaattgaagcatctaagactctttagttggcattactgacattacacaggctcagagatttccatgtatacatgagaacggtgtgaagtaaacacccatcttgacacatctgagcaggccagtgattacatccacatttctttcactgtttctttcatgagggggtttgttcaggatccatgaaaatatcaggaaacaggatttagaatatgaagtaattacaggttgtactagtaacttaagctattttatacacagatattgtcatcataactcagaatctcaatgaagatgaaccagggttctattatgtctaaaaaggaatttttgtattataagggaggggtaggcagagaagaaaagagaagcagttggataagttagtactacgatcaaatttccaactcaagatccacagacttcctctcttcccttaaataagccaataaagtttccacatagctcctttgctaatgcatttaatagtgtttcaaaaataagtcatttatgagtaaatgcagaatcattcaaatagcacttagcactgtgcagtctttagagttaaacagaaaagctggccaggcacagtggcttacgcctataatctcagcactttgggaggacaaggcaagaagmcttcttgagcctaggagaccagcctggacaataaagtgaaaccctatctctacaaatatcaaaaattagctgggcatggtggtacatgcctttggtcccagctatatgggagactgaggcaggaggagtgcttgagcccaggaggttgaggctgcagtgagctgtgttggtgccactgtagtacagcctgtgtaacagagcaagaccctatctcaaaaaaataaaaataaattaataaaattaaaattcccatgaaaagaagagactgaagatagagggaaagaaagttatcgaagctattacagtggtagacaaggctggaaaagaaggactccatcaggctttgctaatgagttaggaccttattttttgataaatttttattctgtgggtcacagaaagttagtagtaatctgtgctgtaactgttttcttcccattccaagtgtagcatttcttttatgatatattacctcccccaaattgatttttattttaaatatatactagtgtgatttgacactgaagtttacaatgtaattgctaactatatttataaatcaatttgggttctaactgcctaataaatgttaaccatctttatgtaaaggaatttttctttaatgatggagggaatagggaagtatattgtatctaaggagacagtgtcagcttattaaatctaactgaagaaagtatatttttactgttaccttccaccttacttttattaaagaaaatcttggaaagctagaagataagatactctacaaagttattcattattgggaactctcatctcagaagagtgacttaagacagggagctaatgtgatttttatatgtctaactagagtttatgccatttgtagttaacaaacccaggcaggaattaatccaggtcactctgagtgtgagctttaaatttgatttcctttatttacattgttaatctccatgtattcactgtcagaactgtgcatttttatattttagtatttttccctttgagtttctctgaaatgttttcttctagaagtgtttttgcatctttaacaaattctgcttcactggcttttttcttttaaaccttgaattttcttcatggttctgttctgtctcttctcttccttctctgcacactaagtggtttcatctcctctaatacttttcatgattccatctagtatctgtacgtagatgatctcagttatctctcaaggctgaatctcttttaagttcttgacctttgtttctaattgcctaataaaaatcagtttacttcaaacttagtatcactaaaatagaactactctcacatcacttcttatctagttttcatatttctgttcatcgtaccaaccacctctcagagacaccttagcatggacatcatcatctttgactctttaatgttcccccagccaaatctgctcagtttgccgggtcttattttaccttggtaatctctcttgaatatatgagtgagctgagatcacgccactgcactccagcctggccgacagagtgagactctgtctcaaaaaaaaaaaaagaaaaaagaaaaaattctgagagtcaactgggtgattctgggttgcacagctgatctctctatgctctttcacatgtctgtggttagctggtgggtgacctggcatctgatctacaatggcctcatgcacatgtctggcattcacaggctgttggccgagtgcttcatttctacatgtagccttctatcctccagcagactatctcactgtcatgcacatagtagtccatggttccaagtgctgcaagagagattaagcctcaatacacacatgtttttctaggtctctgcttggatcccatttgctgctatacaagcctatattcaaggatagagaaatagactgagttctaatgggaggagccacaaaattgcatcacaaagagacaggaagaatttgtggccattgttggagtgcatcacattgtctttccccagtttatcctaaaacagccactaatttaattttgttttacaactcagccccgatgggattatcctctgctttaaaactgtcagtagtaccctcttgcccctaaatggtgtagaaacagtagcttaatctgcctcaacccatctttctagcttaatttttctctgctcccctttctctacccaagttggactagtttcacaactggtccacctagcctttaaggcccagctcatataccagcacgtgcatgaatccttcctagattttcctctccttagtcctcacatttgcttctctctacctcttaagttgaaatggtgttcccttctttggttttctcataaatgtttgcacctttcttgtagtagttgtgattttttaccttataattatatgtgtatgtgacccacctcgcccaccacactgacaactcttttaagagctggaacctaagctggacatcacacctgtaatcccagctacttgggaggctgaggtgggaagattgcttgagcaatcttcaggagtttgagtccagcctggacttaaaatagcaagactgtcttaaaaaaaaaaaaaaattaaaattaaaaaaaataaagagctggaacctgaactcgttcatcttcatagctatccatgcgtaatattcggaattctgtcttgcacatagccatcaaaatatttgagttaatttttgaataatgctatttcccaattattataatgttattttaaaaatcagttaatttttaaatttttctttcagaccagaaactagagaacrgtatccaaataaatttatccagcgagatgatactgaaagattttacattctgaacacactattcaacctaccaggtagattcattctatgcttatttatactgatgctttcccttctgtgaccattagtctgtattcaagggaggtaatgaaataagtttgaattatttcattatagcttatgaatatctgttcttcatttttcagagacctacctgttggcctgcctagtagatttttttactaattgtcccagatataccaggtatgtatatactataattatttttttccaattgatttttaaaattaatgcacagggttttagagaactggccattgtaggtcttttctgcttttctaaagtgaatttagtgctagtgagagatgccacattgccaacctgagagatgggacagcaccagcagctccatgcaggctctcacctcccacacggcccctctccttgccagtgtgctgcagccaccacttctgattggcttctcctgggaatgaagacggccagcagaggtgctaattgtgacaactgagtgggaggtttgtgtgatgattatctgtccaagcagaattacactaaaaccccccaactcatttcacagcagctacccaggagccattcagggatggtaatttaatttcattcccaggccmggcaagatttgattaaggaataaatactgtgtatcttatcagaagtaaaattttgcgtaagtcttaaacaagttatcctctccctttagggagaattatatagccaatactgaaagtttagccatctatataccagagttggctaacttcttatcctctttgggctttatccacttgaagacactaaatttggtggaaagctgagtcactgaactaaataaaaaaatggacagtacctttgtacttagggacagtgtcaggaaagtcagggtggaaagaacctaaatgaccaattttaagttttaaatgtttcttcaacctgtttctaaaaagtgataaatwaaaaaacctgacatttttggaactttggccttttagcttccattcaatatattcttctatcactttgtatttgttcacaattactgtattccattgaacactatagccatttctggtggtcaaagtggactttcattagggagtaattattttcctcattagccacagcctttacccatgtgatatggaacctttgggtcccctgggaaatttttgatatatattttgtttaccctgttttggatcccctgtcatgttatttttatctttctgtagttgtgaaacaggatttaaagatggggacctcttcatgtcctaccggagtatgttccaggatgtaagagatgctgttgactgggttcattacaaggtacctagaagctgtttcttcacctgcttgctttctggcatgtattttatggcgtggcattaactttccaaatggagcagaatatttctttttttaaaaaaagaaaaaacagatttgcccccgcctagtgatagccctctagaatacatttgttcttgtctttggtctcggtggtaatgttgatctttcctcagtgatggtgtttggcttctggattttattttagtttgcatttctcaaacttagaagaggttttagtgtattacattatacttaacatatcctttgtggatgacagtggtccattttttttgtccagatacctcccacccgactaataacattaataaatattaaatttacatgtattataaactattgaataaaatatgaaatgccttttaatttcaaacttaaaatagaaactgttttatattttgaagacaaattttagaggcagggttgcagcaaatcatacctgctacttttttctggccttctctagtttgtccacttttccattttggtaaatccttaagaaatgcatttggggctgggcatgatggctcatgcctgtaatcccagcactttgtgatgccaaggcaggtggattgcttgagctcaggagttcaagactagcctgggcaacatgacaaaaccctgtctgtacaagaaatacagaaaattagccaggcatgttggtgtggacctgtggtcctagctacttgggaggctgaagtgggaggatcacctgagcctggggaggtcgaggctgcagtgagctgagattgtaccactgcactctagcatgggcaacagggtgaccttgtctcaaaaaaagaaaggatttgggttgattagtaaaaaccatttttcttataaactacatgttaaaaactgattttgttcttttcttaattcttttttttgtcttcctccagggctcccttaaggaaaagacagttgaaaatcttgagaagtatgtagtcaaagatgtaagtaatataggggaaaatagatctgcataatagctcattttacctattagggaaattaataacaagctgatttataatgaaatggacaaaagaagagatttgtcttggcatagtatgtgtcgggtataatcaccaagaatattcagctagagcataggtcttagtagagtttttcctgtttcttgataggcaagaagactcagtatttcatttttcctgtttcttgataggcaagaagactcagtattgcatttgttcgcttagcttcaattataatagcagttagaggtttactgtatgcacatcatcaccatgctaagtgattacatgcattatgccatttaatcttctgtatgaccttgagttaggtattattgttgcctctgttttatagataaaaaacctgagaaatagagggattaaataacttgccagaggtcacacagttagtaagtagtaaagctaagtcacacccaaatcataactactgcactagatcatctcaaaaatgtgcatatatgttactgttatttaaaatgcmtttaacctgtcaacagagagtaatgaggaaagctttaaagtacyttaaaaggcattagtggcaaacctgataaaattttttaaaaaatctgtggttaatagtattgtaccaatgttaatttcatacttttcataattatactgtggttatataagatgttaatattaagggaaactggaggaagaatatatgggaactctttattttcacagcttttctataagtctagaactgttttagaataaaaattaaacacacatagtgccccaagatgacatacttctttcttttcctacagagtaaaagtagcagaatacagtattttctcaaagtactgtggtaaagatttcttgttttcagtttttgtgcttcctattttcacccacctcccttatttcaagaaagaacactgaatggggagggtccgggagaatttgagtgaaggaatctatttgctatgcgagaaggaaaagatatttttctttccaggcacatgaggggttagaatttcctcatttaagcgcacgtgggtgtgggtatttctaggtagcatctgcacatgtcatttcattctgcaaggtgttttataaaaccatagtgtacacactgaaagccatatctaataatctctatgtagagcatgtttaaatcagcttctgctgacctttaacacacctcacatacttcaagaaatctcaaggtaatttaaactctttcctgaggcagacatcatgaggaaggtagagatatgttgttaacagccatataacccctataaatatgtgtataattttacatgtaaatctattacatacactgtgtatactacatatgttaatactttattcatttatagtgataatgtgggcttttaagtgcaaaattctgaaatcagctaacccttaaaagkttcccccattcctgtkgtggacagaaaccagtatttgacaactccaaagtgtaaagataaaaatgttttcgtgtttcactcattatccaattacatttcagggaaaactgcctttgcttctgagccggatgaaggaagtagggaaagtatttcttgctaccaacagtgactataaatatacagatgtaagtgcttcatgtgtatatttatttatgcagtggaattattttggcctaaagaactgtgaagacaatgaggaagatagaagtttattaagtgaaaatagtttcttgccttctcattttcaaagagtaaaaaggcaaaaatatacaggataacagtggttctcaaatttttctagaaatttattttaaccattttcactgattataattggctacttgaaaattttaatcttggggttatttaaaacatttgtaaagattaaaatggcttttgtgtctctttggagcatcatttctataaacttgagcagtcacaccccttattgatgtgtatgtatgactttccctgctgttggaagacctgcagcaatagatgctgcacagatgttttggctcttagctgtcaaaatttatatatcttttttttttttttttttttttttttgagacagagtctcactctgtcgcccaggctggggtgcagtggtgcgatctcggctcactgcaacctctgccgcctgggttcaagcaattctcctgcctcagcctcccaagtagctgggattacaggcacctgccactgcgcctggctaatttttttgtatttttagtagagacgaggttttaacatcttggacaggctggtcttgaactcctgacctcgtgatccacccaccttggcctcccaaagtgctgggattacaggcgtgagtcactgtgcccagcccaaaatttactacctcttaaaaacagttttttcccatgattaaagcatgtggaaaaactgatctaactccttaacttcatcttacttttgctgagacacttaaaaatttatagtactggcaagaagttccacttcccccaattcgctgtacatgtaaayttgatttagacacctggtgatttgtagtaaacagtcttacataaaccgttggtttgttgacttagttggtctagggatggcagtagcgaagccaaggtgataggttatttctgtgtgagtcattagttttctctatacccctacctcatatgctcctttcctccaaatgtgtgttcaaaaacatcttccagaggaagtatgtatcctccctgagaatgtcagaagcctttttttctttttggtatatggtaaagcattaatttctggcttccactgccatgatttcataaaatttagaggaaacaagaatgtggtgagtcctatgttgaaaaagacatgttttgtgaaaagcttgtaatttctttaggttatataccttttgcaaaagtagtatatggaccttatgttaaatttttttttccagaaaattatgacttacctgtttgacttcccacatggccccaaggtaccgtatgtgactcaatagaccaytgctttaataacartgaatgcatttaatcattctggaatattaagggggaaagaattggtcagaacccacccagaaaagtcctactttttaagcctattgtctaatcttcattaacattagaagtaatccaggagctagtagaatttaaaatcaaattgctaatttagagtccgcaacttgaatacttaatagacagaaataaaagggatattcatgtgatatttagtaggatgggatcagaataattttatgcccaagaagttctatgcaaaattaagtttgtgtggcaatgaaaggaattttcaggttgtggatgatatttgattaacagaaacagaaaatgtatgtgtattcttgacaacttctagattttgtattagttgttgctaartttttgccaagagagcactcagccttgatatttagcagagaagtcttcatttctgcagtacggctgcacttaggtttaaggaatactccttgcaacttagtcacatacttacagaattttagtcctagactttagtgaataaacatcagcaaatccctgttttgagaacacctgaaatcacagtgtgcagtgcccttcaggttggtcttaaaaggttaatgccagggttccatttcaggatagtcatgattttaatgggcataactcagtattgtgattagcttacactgtgagccaaaagccagtgtgtacctagagccatcattctgagaatgtaaccagtaaaatttcctaatagttccatgttagtttgtatactttagctctgatgcctgcctctgtcttaatctgtcccttgggtattgatttgcatctctccctagctcttttgagctccttttagcaaatttcaggtgagcacactttcataaagtgctgtaaaataagttattgtaatttagtagtagatgaaatgatttaatgtatagaatgtgttattacagttatttattatttatatcttgtctgcttcccaaaggatatggcttataatacatagacacaatttttttttttttttttgagatggagtcttgctctgttgccaagctggagtgcagtggcacgatctcggctcactgcaacctccccctcctaggttcaagcgattctcgagcctcagcctcccaagtagctgggactacaggcgcccgccaccacgcccggctaatttttgtagttttagtagagacaggttttcaccatgttggccaggatggtcttgatttccggaccttgtgatctgcccgcctcggcctcccaaagtactgggattacaggtgtgagccactgtgcctggctgacacaatacctttttaaaaaataaaatagtgggatcttctggctatacttagtatttttatattccttgcatctgagtgagattaaatagtaatgccttaaggtaaggagtgatgtttcaacttttgctgtttctccttcaccagcctgggagctcccatcgaccatggcagtcctactttgacttgatcttggtggatgcacggaaaccactcttttttggagaaggcacagtactgcgtcaggtggatactgtaagtcatgagaatgatctgtcttgctagcacattgtccttaatgtttctccttcccccactcttactctacataaggaaacaggaattttttttttttaattagccgtatctctcttttgaaattaagagttttggtcttaactgaaacagtcaaacaaacccactaattgaaaagagtaagtgccattcatttggctgtctggccaagtagcactggtggtggggggtgggatgggagggttgtggggtgaggggaggattgtgataggatgataaagtattacaaaatccatattcttcatacagaaaactggcaagctgaaaattggtacctacacagggcccctacagcatggtatcgtctactcaggaggtaagtcacagacttccctttatttaatgtctttgctcagacctcacagtgaaagctttggtaatctctcagcaaagtgccacatatactgtttagtagtctaagatgtcatctactgaaggtaaatagtttagtcacctcttaatgcaatnggagtctgggtttgagcagttgttagtatatcctaatgaatctgattttcactaaaatgatcagtttttttttwaaatcctattggaggctttttctcagtgcttcgaatcacttgggggtacttctcaatatgttctcaagggtttctcaaggagttccatgggtataggtacatagtatgttggagttataaacagttgagtaaagccagcttaatggcagatttgtgatgaaattggcagtggctgttttgaaggttattttcactaagctgaggatgtagttttgttgctcttggatttggtgagcaagagctctggtcagcacagtggagctgaaggccttgtcttagaaggcagtaaaaagagaatggtgagtctttgtctattcttcctagtctgttcctcatataagaataaaatgaatcatagtatttaatggttaaatactattggaatgctgattttaatatagggacagttttctcattgttcactctgttggttcaggttcttctgatacgatctgtgacctgttgggagccaagggaaaagacattttgtatattggagatcacatttttggggacattttaaaatcaaagaaacggcaagggtggcgaacttttttggtgattcctgaactcgcacaggagctacatgtctggactgacaagagttgtaagccattcataaatctttggtgtaatttatatctaaatgaccagctttgaatcagtcgtctttgataaaccattactttgtattcaggaagtcagaggtggtcaaaaggcaggccttgatatttggatacttccttcccatagaatattcagatatttcacagaactccagaatttgaataaatatgagaggttatcttgtttaaccttcttgaatctcttcgaggdtaagtttagaatgttggygtcttgagttgtgttacagtaacactaagttgtgaactggagctcaacttttcctctgtggtcccatatttccccaaccatgcctagcagtcccagtctctctgctaacagcccatatctgtgattctggggcagtgatggctctgaatgttaatcacctctggtattttttatttactcttctgagatctagagaatgaggccatattgtattcttgaactaagctaygctgtgtatatgcagtatacacactgtgctgaactgagttacggatatagttctgtaaaagtgcttgatatacaagttctccagccagccttgatgcgcattacctgcagtgtggtgaaggtgactccggaaactcagcctgcctggggtaggagccctggctccataacttgaaatctgcatgccgttaggcaagttaatgagataccctgtgccttagtttcctcaaatgtaaaaatggggataatacctmcctcctaaagctgatgaaaaacggaggtaatatgtgtataaagatvgacatgacagcctttctcaaccaaggctccatatccgaaacacagaaaattattactattattttacctttccaatggagctgaatacagaaaattatttgagtaacacttttctcaattctcctaaagatggtagatagaagaaaatgtgttacatacagtagatgaaggagggcttgtcttgaggaacccagactgacaaaggctgcaacacaccggcagcatgctgtagatgctggctgttgctgttactgtctgtactatcagtgggattttctggctagcctttcattcacattttcaactttctacctatgaagttttagaaatctagttgatttggccctggacctgtgactcaggaaaagtcacctgattctcaatctttcatctgaaaatgggactgttaacatttgcttagctgactgcacctgagacagcatgtaaattctggtactttacaagctcagaatgagcgtgcagctggaagggaaagttgtcatcatggtgtttaagcaggaggaaaggcagttaaagagaaggtgatggtgttcatctgttgtcagactccaagcaggtatcagtgagttatcctgaagaggggaagaggaggtaactgtacactcagcatgttagtcccaggttctactttccagtcacatctgcaaccttttagtttagcagcagttaagaactaggtgcttatttatttaaaatgtcttcattttccttccaaaccttaactagcacttttcgaagaacttcagagcttggatattttcttggctgaactctacaagtaagttttctaaaaatttctttcccaaaaacttattcaggaatcacttagatataagaaatgttctttccaggccagtaatcccagctatttgggaggctgaggcaggagaatcgtttgaaccggggaaatggaggttgcagtgagctgagattgcaccattgcactccagcctgggcgacaagagtgaaactccgtctcaaaaaaaaaaaaagttctttccaggccaggcgcagtggctcatgcctgtaatcccagcactttgggaggccaaggcaggcgggttgcttgaggccagaagtttgagaccagcctgaccaacatggcaaacgaaaccccatctctaccagaaatacaaaaagtagctgagtgtggtggcacatgcctgtaatcccagctaattagggtggctgaggcaggagaatcgcttgaagctgggaggcagaggttgcagtgagccgcgatcacacccctgcactccagcctgagtgacagaatgagactgtcttaaagaataaaaaaaagctcttcccagagattttcactgagtttttcttttatctttaggcatcttgacagcagtagcaatgagcgtccagacatcagttccatccagagacgtattaaggtatccaaatgggatttgggagaaaacttgggaaataagtttaaatgcttttttcacattnctgatttattakagagactagcattcaactactgctcaataaatatttgttgaatgagccaarmatcaatcttgttctttgttttagaaagtaactcatgacatggacatgtgctatgggatgatgggaagcctgtttcgcagtggctcccggcagaccctttttgccagtcaagtgatgcgttatgctgacctctatgcagcatctttcatcaacctgctgtattaccctttcagctacctcttcagggctgcccatgtcttggtgagttaaagctgtaatggacagccaagatgtactctaagcccagggtcagcaaccacctttgtgagatggcacaggagatagtttgaacatttctttctgatgtacagagcccaggggcaggttatatggttgcataagaaggggtctttgagaaagtagaaccaacattggaagttaagagtgtaactttactctctgaagtctactctattaaaagctgtatgtgggccaggcatggtggctcatgcctgtaaccccagaactttagaggctgaggtgggaggattgattgagcccaggaagtcgaggctgcagtgggctgtgattgctccactgtactccagcctgggtgacagcgagagaccatctcaagaaaaagaaaatgtggtttttacattcctttattctgatctgtttcaggactatcttgtttttgctgtaaaatagaaagtaaactcccctctccatcttttccaatttccagctgcagtagacaatatgggcaccattttgaggggcagggagagaggaagacaggcaactataagtagttctatgaagataagtctatattgacttgtcctgtggtccattatagatgtaattgcatggccacctaacagaggagaggggttaggatttggggagtagctactttgctctgcctgctttctgagcctctagcttttttctgtctagatgcctcatgaatcaacggtggagcacacacacgtagatwtcaatgagatggagtctcctcttgccacccggaaccgcacatcagtggatttcaaagacactgactacaagcggcaccagctgacacggtcaattagtgagattaaacctcccaacctcttcccactggccccccaggaaattacacactgccatgaygaagatgatgatgaagaggaggaggaggaggaagaataaggaggaaaaccaaaaccccaagcacccattaaacaagtcctggcaggactcacaggaacaaacgaggtccctgttagggttctactcgggggagggagggggctccatgaaaggtacgtctgaaaagtttctgaagattttattatcatagatacttgttttggttttgtgtatctgtactctctgcagatggtccaaaattgtaatggagtctgtattagaagaaaataagggtaaaatcaggctgaactgcatgtatatggctccactgtggcttgtgacacktttaaaatcatccgtatgtcagtgtatctggatacacgaggaaaaggaaagagtctcagagtggaacaaagagtgggaagaggtgatctgtaatgttacaaattgtgctattactccaaggtccaacttttccagtgcattacatggtattgtatatcagtggagaaatgtattatttccatgatcaaatgtagtctctgttaaggtcaagttttcttttataagcctttaattcatcctcagtgactctggcaaggctgcttctctatcactggctttgcacagaagwatgctctactwgcgttgctttagggcaggattctattttgagggaaaagacagtatccttattaccttttgtttgtttaatagcacaaatgcttatttgttatccaaaaacaacctccttcttatctgtgataaatctatagaaagaatttagctgcaagtggacaaaggaacaagcccccagaaaagaaagggaagaactgccttcttatactacagaacatgcattagtgtgggctatatagctgtggctcatgctacccaattccagatttctttgtcctctaagagttgattgctgtatattaaaattgaacatcagaggatgggaagagggctctgtaagccagaaccttactaaagtagagggcacaatcagtgtgaataaattcacttcagaatctcaagtcaaggccaggcacggcrgctcacgcctgtaatcccagcactttgggaggccgagacaggcggatcacctgaggtcgggagttcgagaccagccttaccaacatggagaaaccccatctctactaaaaatacaaaattacctgggcgtggtggtgcatgcctgtaatcccatcatctactcaggaggctgaggcaggagaattgcttgaacccaggaggcggaggttgcagtgagccaggattgtgccattgcactccagcctgggcaacaagaacaaaactccatctcaaaaaataaaaatcccaatcccaagtcgaaatcacytcttgttttaaacaagaatgaatcattactgtgtatgttagggtattaaaactgtttcaccagtacagtgaaagttgtttcaacattttaaacaaacagtggttatagactctttctttaaccattgtatattttcttccattcttgtcattggtcaataggggagggtagattagctgctccagaattcaataaagtgtaatatttctaacggtgactttgacctattctgtagtacaactgtaatagctattggtcttcaagtgggtttagatttggtgacatcagtttgatattctcttaaaggaaataaatattcaagaactgattatgttctaacatgattatattcatggtgttacataggcctcaattttttcacagaaagatttttggaacaggactgtgaagtgaggctttttaaaaaattattttataagcagagaacacagcctgataacttagtcaaggatatactgtctgtctcactactttggacttatatggcttcagattaagtcatccaagaaacatacatacattctaaatggtatatattgggaatatatgcccctttaaaagaatcaggtcagaaatgcaataacaattagactagactgttgcccgtgttaggagaatgtgtggtcatcctagttactaattactctcactcaagatggagatgttgtccagtttaacatagtcttaagttttcttaaacccaaataatttatgagtagcttattacatctgcagagctaccttattataatagtacatttacatattgtctcttttagagtaaggaccacatgattgctttgctttaatttaccactttttgtattgcatccatataagagtgtcttactagccagatgattccatggcaaatgattctctgggtccaaagatcggaaagtgaaaagcacacagctggaataagcaacaactccactgctagttacagctctccgtaggaccaccaaaacgtattcaagagctctaggattccataagacccagagcaaaatggtgcctctctgtatattattcttaagagtgtgctgggaagtcaatggtccatgggtaggcagggcagctgtaactgggctttttaaaacaaattatgagtttctctctgttgccagtagttaaggaagctgaacttaaaaggtatacttttttccttaaaaaaaaaaaaaaaaaaaaaaaaaaaaaatcctgcggagttttataccgtgagaagaccattctgccacttcttttgagaattttttcccaggcattttgaaaacactataggcattgtagaacaccagacaaccccttcttggttgctagactgaactcccaaccttacagcatgtactgacaggtcccctagcctccccagcagttggtcagtggtacagcagacccaggccctgctgggtttccttgggcagaggaattgcccagtacattcattcatctctgcaaagatagatagtcagtgaaaactctgatggtgtacttcagaaaagttggtcacagccaagaaagtttagggttctatttagacctaagatttttctcttgccataagcatacctctgctgagacctaaaataataacgcaaacccttcaagctaccctaagatacttttagaagtcgtttttaatagaactacaaatccttaagtcacattagcattgttaagaaaccactttaaaaagccacatgcagttgcatgtcagatttagaagtattttgtccatgtttaggtatttctaaatcagatgtatttatttaagaaatactttgtcaacaactttaaagcccagcaatttttccaaggctgcctggtcattttaaaataaatactctgcttattcaccacgaatagcctgagmcaactacatatttaagtctgtattagggtaggaaccttacccacattccatgttatggaaactatttaatctgtctttgatggtgggaaaaatggtaactatgatctagctattgccatacagttaacgctccaattcctcactgggcttagtagtttagggctcaaatacttatgtttctcatgatgatctttagtggtgatcagggaatccagcttttcttaaaagtttttcctcaaatagaacaatttcaaatgatacacaacttttgggaggccctgagagtgaaatctctaccatggagctaccagagcaaccctgcagatagaagaaaaacatgcactactgctaaggagcagggatgaccacaggcacaggcaaccagaaagcagaaacaggtgacttccagaaacccccgctgccccgtcacgcacctcccgtaacaagaacgcagcacgtcacacagttctcgcgctgctaggtatctagaaacagcagaaagcaagtcctttaaacaggcagcatgttcatttatagaatgagtaaaaagcttttctattctttaacctggatttctcaaccatttttccctgtcctcacacacaatgtcttcatcccaaggccacaacagtctgattcattccaacaaaggtatgtgatctcaaaaataaaatatatacagaagtttctctgtagagctttaacacaaaaaagtactccccattgaacacaaacatttcatctcaaacttgctgactctgtttaaggatgaggaatctatgttttccaatttaaatttaaaacacaatgatgaattttgaatctcgtccctttgtttcttcacacaaaataactaggtacaactatgtccccagatgttctggtctcccatggagctcttcccaaagccatgtctggcgaggggagtagacaaggcctgagataaaccttcccacacaaactggagcccaagcagctgagcacacatttttcccacgaaaggcagcaatagtccttccacgtctcacaagttcttgagatacttggaaagaagatttgccaagcaaaccttccccacactgaaaaatgtttactcagtgtccagtctttgagagagtgttctcaccagagttatctttgacttgagtgtgtgggtatctttaaacaagtcactttttggacccactgacctcaagtcaatgacttagtagaactgcagtaggaaaactggccccatctaaaatttcctatcatgtgttggcctcctgtttgaacactgcacagtcactaatacactgacaggaaaagcacttcagaagtcgggcaactaattctcccttagaaacgtgcgtcctcagtcctcagtaatccactaggggagatggcatgccagcagaaagtcagagaaaagggccctagaaccatccctttgtcctgggactgcttgaaaataagagcacagatatgaggcccttggagggaaaatgacaaaaccaccatacaaagaaagcaaaagagtttattatccacctaatagaattcaactttttggctttaataaagaatcatctcttttaaattaccttcaaaaagtataaaataagtttccagaaatcaactccaggctataaaaaggtcagtttttaaccactttctctacaagaccctctgatcaatatttgtttcctcagaagtgccgagttgaaaaacggctctagggagcacaatttttgtgaaatagaaaccccgggtgcatcacgataaagcttagaaatgagcggatgtgtgcgcactctgaggatgcaggggggagttttaggcaaatctcatcttgacagcaggaaaaattgcctccattttccttggagcatttcctgatttgagctaagggctcatctagaccaagtgagtaaaacaggaaaaacaaaccaaggcaggaggctgggagtgaatgtgctaccatgatttctttccctagctctgctgccactttctgccctgcttctaatgaaagcaagcagggttcgaagacagcatttcactgggctaagatacacctcattctactttcaggtagttgggcgatacctggggagatgggagcggtagttaggtcaggcagtgtctgaaagccaattctgtcagcagttcttccctgaaatgtctccatccacagaacaagtgtaagtaaaagactgcaaatgccacggtcaaataaattcagtggagactataaatggaccagtcaagaggctaaattttcagagcacgatcctctttggaatgtaaaatagagactaaaagtggagagaaaagggattccaaaaagatgtggtttaggaatggatcacagagggtccctgaagctccaccgtaagttcttcagggactggtctcatgtgagtgatgagggtaagaaggaacagaagacaaaagtagtgatggaaaagaacgtgtatcatacacaccgattactggggaatgcaggatatccactgaatcctgaagacccacctgcacacgcctcgccacactcaggccggatgttttccacttgaaagtgactatccatgcctgctccgaccttcctcccaggcttagcatagcagaggaggacctataaagccatccttgttttcaagagccaattgagaggcctgaatgagacctttggtcttacctaggaaatgccggcttagcccagcggcactgtgtgttgttattagtgactgagcagccaatgtctggggcaatttgactggatactccgaatgttcttatgtagagagtaactgatggagaacagattataatccttgcaaagaaggacaccttccccctaggattggctgtaccaggctgtgacttggaggcacagaactagtacccacttctcttaagactttacactgtccaaagaagatgctcttctatgttgtcatgctgagatccagtcccagctttcccaccagcaaagccaggcaagtgggtagggcagttggttcagccaagctgaatacaatggcatggttggtgttgcacagatgaaagggaagagggaacacacatctgctaacagggtgaacagaacatcatttatctaaatagaatagaaataaacaaaaaccttgtaaaacaatcacaaaatttacaaataaattggtacaaaataaataggagagactgtacatctacatcatttgaattataaaatgcattcattaagacaatcagctcaatcctatacatgtcatttgtgcttatttaggtttatgtacacagctctgaatactgtgttcagaaaacttcactgctcaaatgcatgacctgtacactatgatacagtgaataaaggctgaggaggatcaaagtcagacacaaagcagggtcttacttgagggccaaggcaatgttggcactgggcctcaaaaccaagaaaaggcatattaagagcccagataggcaggcagcttccattatccagaaagatggattatgcaatctaaggtaagtggaagaaaccattatcactgtggggccaggcaagtgacctgccttgggaggagggaggccgtggactcacagctgtactgtaccctacataggggaagagagcctgtcaccaagaaaccaccttggaaatatttcatggaggtacttgagaggccctgcccacaaggtaggagacctgcctccatcctcatccaaaacactggtcataaggaatacaggtgggcccaactaaaggggctggggatgctagggccaacataaaagcagcaacctgtttataaaaaacaacactaccctctcacccgccttaaaggacagcagaaccctaggatccatggatgaggaagcttcaagacagaccttgtcctagtcacagacgaagtactaacaggcatatgtacataataaataatataaaataaagcatatacatttgtgggtttaaaggactcaaacaagaaaaaattgataacttcaccttcacagtagattcagacttggggagtaatgatcagaagcgaggctggggctctctggggaatgagaatcctaagacctcattcttcccaactttgctctgctctagaagtctgagcctccaacaaaaaaggcaggcacccaagccccaccaggcccattggatagttctcttcagggtgaatctgcagccaaatctggcccccaaagaactgcatcctaaaagtgaatccatgtggatcagatgccggaaggcrtccttccaagcgaggcaagacaatgctcccattcttctcatttgttcacggtcccaatgggcattaaaacctgaaaaccttgtgtactcaagtctttcttacagtatgtgttggatctgtgtacatataaaccttggcatacaaacacctagaactttactctcttgcagctagaacctttgtt

SEQ ID NO: 94992 - DNA, 87434 bp, Homo sapiens
  misc_feature (1)...(87434): n = A,T,C or G
agcttgagtgctagaatgacaatgtgatcaaaacactatgtgaatattattcgggcttaaaaagaaaaaaatattgcagccataaaaaagaataaatttggccgggcgcagtggctcacgcctgtaatcccagcactttgggaggccaaggtgggcagatcacgaggtcaggagatcgagaccatcctggctaacgcggtgaaaccccatgttagtctctattaaaaatacaaaaaattagcagggcgtggtggtgggcgcctgtagtcccagctactcgggtggctgaggcaggagaatggcgtgaacccaggaggcggagcttgcagtgagccgggattgcgccactgcacttcagcctgggagacagagcgagattctgtctcaaaaaaaaaagagttcatgtcctttgcagggacatggatgaagctggaaaccatcattctcagcaaactaacacagaaacagaaaaccaaacactgcatgttctcactcataagagggagctgaacaatgagaaaacatggacagagggaagggaacatcacacaccagggcatatcgggggttgcagggcaaggggagggagagcattaggacaaatacctaatgcatgcggggcttaaaacctagatgatgggttgataggtgcagcaaaccaccatggcacatgtatacctatgtaacaaacctgcacattctgcacatgcactccagaacttaaagtaaaataaaaataaaaaaataaaaaaagagaaagtctaaaaaaaagaaagaaaaaaatatactaccatttgccacagcatggatggagcagcaggacattatggtaagcgaaataagacagacacaaagaacaatattgcatgatctcatatgtgaaatctttttttttttttttaacaaaaaaggtaaaacatatagaaatagagaataaaacagtggttaccagggtcagagtgacaggaagggaaggaaatggggaaatgtaggtcaaaagatacaaagtagcaaatacctaggataaacaaattgagagatctaatgtacaacatgaggactacagttaataataatgcattgtattcaggatttttgtttgtttgtttgtttgtttttttaagataaggtctaactctgtcacccaggctggagtgcagcagcacgatctcggctcactgcaacctccacctcccaggctcaagaaatcctctcacctcagcctctgagtagctgtgaccacaggcgcgtgccaccatgcccagctaattttttgtatttttggtagagatggggttttgccatgttgcccaggctgatcttgaactgctgggctcaagcgatccacccacctcggcttcccaaagtgctgggattataggcatgagccacaacgcctggtggtgactacagctgctcatgccccaggcagaaaaaaatgggtaactatatgaaatgacggatatattaccactatagtaaccattttaatatatatacaaaatatctatcttataccatcatgttatataccttaaatttacacaaataaaatttattaaaaaaaaaaactacatggaacagtatagttccccaaaggaaagaggaattctttgcagacaaaaccaacattagctataataggggtcaacaatgtagatagccccattatttacaatctgtgccagcaaactacaccctgtggaccaaacctgcctatgagctgcttcataaaggcttattggaactcaacatacaaacaaacaaacaaaacatgatgtgaaaagaaaagaggtagtgaattaattctgtttgggaaaaaggaggaaataattgattgtaaaagtatatgctagcgtgaactactctaatagcttcctgtataaaacatggaaatgatagctttcattttatagtcagagttttgtcgccaaattcccagagaaatctaattttaaaataaccatctgttacttttcattatcatttatgaggcagctaaaatgcattatggctcaatatatacaaatatattgatacaagcagttacattaatattaatttaataagatgatttctcattagaaagacacagtttttttgtttttagctccaatgctttctgaagaaaagacacagttttgaaaacaagtatgctccaggtactaaggaaaacacaaacacacacaaatctgtccactgttaggttgaaatgcaaaaagctaagcatcatcccttttaaaaattaaagatggaaaaaataaaatgttcctactctaaatcataaaataagcatttggtctgaaagagtcagcatacctgggaacattattgtttgaatcttcgctttcgtttgccaggccaccaaacaaatagcatttgttaccatataaagagaagctatgtccaagccgaggacaaggaggtaaaccagaaggagggggatggggtttcacttttttccataaccaacgacttgcctaaaaaaaaaaagggcacaaatacagtcagacaaaatcaagaaagcactcctatattgtcaatagtgcaacatcatatcaatacattttaatctaaatcccatcagaaggcactaaaaaactacttttgggacaaatgacaaataaccagctaacttctggaattaaaatatatgttccagtagacattcaagttactcttccatattcacagatttccatggcaaactcagcatataataataaacactaactgttctaaagtagtttccaaatgaaaaataaagtattatacatagcttcaagattaaatgtaatttatatattcttactttctgaaaaaaggtaatccatgaatggtaaatattttaaccttttaaaggtaaacataaagctcatttaacatatcaaattccaaaacttattctctggccatggatgttttctttagctaaaattatttttgcaatgagttgcttgtaaataggtataaccactcacatctgccaattagcagatacccgcatgatcaccgccctagggataaggcacagatcaggaagaaaagtcaacaagggctatgagtctggtttaataagactcaaatttagaaaggttatgggaaactgttactcctcttttgtatgtattgtcaaggtggggggtgtagtaaatattagtatgagggtaacaatttctaaaacactaaagcagtggttttcaaagtatagcctaggggccaggcatggtgattttccaaatgtggaaagttttattcaaagttgtgaatatgtcagttgataccaatgccaactatccctctgtgagtcctgcagtacttaatacttaagaatttgcggcacagcacggtggctcacgtcggctaatcccagcactttgggaggcccaggtgggtggatcacctgaggtcaggagttcaagaccagcctggccaacatggtgaaaacccgtctctactaaaaatacaaaaattagctgggcatggtggcgcgtgcctgtagtcacagctactcaggaggctgaggcaggagaattgcttgaacccaggagacggaggttgcagtgagccgagattgcgcggctgcagtccagcctgggtgacagagcaagactctgtctctaaacaaacaaaccaggagcatcagcagctgggaacctggtagaaatgcaaatgctcatggccttcctctgactcagaaactctctgggtaggacccagcaatctgtgttttcacaggttctccaggcgctcctgttgcaggctaaagtttctactgcattaagatacaaaaacctaaatatataacatgtacaactgatgctacgtaacagatatcttgatgttataaatgttgcactgggtatgggaaaaagacttgccaggaaactttgggttttaagtgaagtggaaacattttctataaagctataaaatgtgaagtttacattacttgaataatattacttgaataatagtttacttgaataatacattacttgaataatattaaaatgtgttaaacaatgttagtaatgttgcaatcttttgaaaaattatgaacaatatcattattaaagcctcagaatgaaacaatattaaatacacttacttgtaactcatataactcattgctgtatcttccatattcaaccattcccccaaatactaatattctggtaccatcacagacaaatccatgggcagcacagcctggagggatatctcctctaacagctggcagaaaccactgattcgtagctagttgccaaaataaaatgaaaaccgattataacaaacaacggttatcatatactatcagcaaatatatatcatcaatatcagtgggtctcaactggggatgattctgccccccagaagacatttggtaatgtctggtgacatttttagttgtcacaactggagggggctgttactggcatctagtaggtagaggcagggatgctgccaaacatcttacaatgtacagggcaatacagggcagcttcccccaacctcaacaaagaattacctggcccaaaaggtcgagagtgctgctgttgaaaaaccctgatctgtatcatttaattcttacaaaacgccctgctgggtgagtataaaaatctctattttacaactgaaaattgtgaggcttaaaaaggtttggtaactttagcgctgatcctgggcaaccggcagagcaagattcaaatcaggtctaatttgttccaaagccagggattttacactaagaccaaagtgtcagtaactttttaccttcatatgctggggcgctgggaggaggagagggtgaaaaaaataaaacttctcagactccactattttgttaaccttcaaattattcctgtgattaagttgtttgatcaaagaaaagttatcggtcatgaagtagacccaaaattccatcactgtctttacaccaaacagatttcttgtgacagcctgagcatttacaaggggaaaaaaaaattaaatccagtttcctttctattccacagaggtcctcaaagataggggctccctgcccaggggcacttgtgatctgcagtggtgctcaagttatgacagtcctctttccgagggccagtccagaaggrcgtccacaccgagtatgcagacacaaggccgcctcaccacgtccccgccgctttagagcgcggctcacggaggggctcttgaccgttacctgccaaacaccgggttgtatttgaggcgagagtgccagaaggcctctcgttttccctcctcaccccctagatggtcttcctcctaaggaaggaaggcaggcaaagacgggaaaggccctaaggaactttggtttggagtgggttttgttttttgacagaggcgagatttcggggagtggcccaggcggttggacatggtcttctgtcgcctgcgtccgcctgtcgggctggggtgggggcgtccgggatcccccgcctgaaggccggtgcgccccgctcggggtccgttgcgccccaagggccccggagatcctgagctgcggtccgggacagagctgccggacccgggctgcccggctgagccgcgctccccgccgcccgcccaaggaagcagtgaccgggcggtgacagctgtcagggccgcggccgccgcctcgcctcccctccccctccgcagctccagcaggsggggccgacgagccgccgccgcgcctaccygtgttgtagacgtgcagctcatccgmgatgccctcatttccccctccaaagatgatcatcagctcccggatggccaccgctcggtgtccgtgccgggcgcgggggaccggccccgtgaaggaagaaactcgcctccagttgaggaggctgggagccgccatyttcccaacccccgcccctstgcccacaatgcaccgctcccgcctcaaccggstgctccctggggagggcggggacccgcctccagctgtgctggggtcacgtggccgcgggcgccggcggccaggctggaggcccgcgggcagtggagagacgctggggaaggggggtcctgacaggggagccccgcccccaccccaggcgacttggccagcggccacccggagcaacgcaccttagggtggaaggacgcttcccactgaccacgtctcccatccccacccagagcctcccgttcggtattttgggaagaagccacagcatcttcctttacgtccactttaattgagcatmtaggatgtgtgggcgaggcagtctcacaagcaacgtgagagaagctcgggtagaggttcgaagagctgggagcgcagggcggggacctcgcacgggagggtgcgggcgggagcctgcctcgcgagcccgggccacggcggctgctcccgaccgtgactgggacccgggcagggaaggtcgctacaaagcctgccgggcgaaccgaaggcagctttgtgcggagccatgccaggaagcttgggaaccgtgagccacaagaggtatttttggtttgtttggcttaagcagaggagagatggttttctaggtttctgtttcattgctagctaacaagtgagggctgtccacagcctggcatgccmtaagtgcctcatgtgtattaactcatgtaatccatccagcaatccagtgtggtggctcctgttatctccctttcatggacggggaaatgaggcacagtgcagtaaggtaattttctgatggacacaaaggagaggtgttgaaaaaaaagactggggccaggattccaacacagggcttctgattccagaacccccaagcccttatatcatataccatactgcctctgatagcagtcatatccaaccattataccatactgcctctggtagcagtcatacgcaactctttatttttatttatttattttagatagggtctggctctgttgccggaatgcagtggcgcgatcagagctcactgcaagctcgagctcctgggctccagtgatcctcctgccttggcctcccaaagtgctggaactacaggcatgagccaccgcacccagccaatgcaacacttaataaggcctagctgccctgtgatttggtcctacacataatcacacaagtccattaggaataaaactgcactgcatatgggattcatgccaaatgagtagattttagccactcttgccacagagacacaaaaagggttggtggtaactatatgagatgatggatatgttaatatgcttcactatagtaaccttgtgactgcctgtttcagctgtccccaacctttttggcactagggaccggtttcatggaagacaatttttccacggacttggcaggggagtgggtggtatggacttggcaaggggatgggggctatggttttggcatgaaactgttccacctcagatcatcaggcataagattctcatagggagtacacaatttagatccctcctatgggcagttcacagtagggttcgagctcctatgagaatctaatgcgcggttgatctgacaggaggcagagctcaggaaggtcatgggggttccgaacaggccgaggactggttgctggggactggggacccctggtctatatgatatcaacttcatattgtatatcttaaatatccacaatacaagttattttttaaaattttaattgaaaaaggactgggcatggtgactcacacctgtaatcccagcacttttggaggctgagacagaaggatccactgatcccaggagtttgagaccagctcggtcaagatggtgagatcccatctctatttttaktaaagagagataaataagagatacaagtccagtggaagaaaaaattgaaagcaatttaaatccctacctcagattctcaagaggtactcaaaggagaacacagacactgtatagtaaatttcctaaaactcttttttcctcttattttaccattttcaatttctcttatatgcctcattcacccaactcccttaaacctcagcatgcttctccaccttctcatctatctaagctttttttgagagataactctctatgttttaaaaaggaattctcaggaygggtgcggtggctcacacctgtaatcccagcactttgagaggccgaggagggcagattacctgaggtcaggagttcgagaccagcctggccaacatggtgaaacccatctctaccaaaaatacaaaaattagccgggcgtggtggtgcatgcctgtaatcccagctacttgggaggctgaggtaggagaatcacttgaacctgggaggcagaggttgcagtgagccaagatggtgccattgcactccagcctgggcaacaagaacaaaactcagtctaaaaaacaaacaaacaaacaaaaaccccaaaaggaattctcactattttttttagcttctgcttcttaaattctccctctcactgagtattaacccatttttttttttttttttgagatggagttttgctcttgttgcccaggctggggtgtaatggcgccgatattggctcactgcaacctccacctcctaggttcaagcaattctcctgcctcagcctcctgagtagctgggattacaggcatgcaccaccacgcctggctaattctgtatttttagtagggatgaggtttctccatgttggtcaggctagtcttgaactcccaacctcaggtgatctgcccaccttggtctcctaaggttctggggttacaggcatgaaccactgcgcctggccagcccaatttcataatatgtccaaagagaatttggaaagggagggagaaataagatgtctgcgaacagaaaagaggttatgaatatttatctattaatatttttctatgtcacatacataacataggaggctyttaaatgttgccataataaagtttttatggatttgaaataaaactggaagagttggaataaagcagtgagtttttcataaaacccaaagtgtttaatttaaagaactgtactttgttctgagagttttgtgcctagatggtagtttttttctaatgcccttatagcacaaggttaaaggaaaaaatcaaacgttccaaccctaatgttgaacttcaaatttaaaaaaactagtctatgatatttgaaagcccaagtacccttgaactaggagaaaaattaaggcaaaatatttttaagacaaaagagattgcaagctataactggtggcttagatagggagctgcagggtgatgaggaaatgtgtactagtttcctagggctgctgtgaaacaataggaatgttttgtttcacagttctgaaggatrtataagtctgaaatcaaagtgtcagtagggctgtgatccctgcaaaacctgtaggaaagaatgcttccatgcctctttctakcttctggtggcagctgtcaatccatggcagcccttgacttgtcaatgaatcactccagtctctgactccatcacatcatcacgtggtgttctccctgtgtgtctgtctcttcttttttttttttctttttgagacaaggtctggctctgtcatccaggttggagtgcaatggtgcgatctcagcttgctgcagcctccacctcccaggcttaagtgatcctcccacctcagcttttggagtagctgagattataggtgtgcactaccatgcctggctagtttttaaattttttctagagatgasgttttaccatgtttcccatgctggtcttgaactcctgagctcaagcaatcctcctgcatcagcctcccaaagtgctgggattacagatgtgagccactgcgcccagcctcttctcctcttattataaattcactagttatattggattagggctcatcctgtgatctcatcttaacttgattatatcagcaaggatcccatatccaaataaagtcatattcataggtacagcgggttaaggcttcagcatgtcttttgggggagatacaattcaatctatgacaaagtacataatccaatgggaaagatgttttagtagagcagttttgagtaatctgtccttgagggaggcatctaaaataggtccccatttcacagtaaagtaccttcaatctctgaaacttcaagaatgtagtttggaaacaacaacctaggaggagagtttggagaagagggatggaaaatagcaccctgaagaagccagsattgatggggtaaagacaagaggaggcactcatgaaggaaatagagaataggtagccagagaagttaaaagggaactgggtgagggtgatgtcaaagaagccacaggcaaagagggtttcatagaggcagaagtggtaaggaaagccaaaagccacagagaggtcagggaagaagaggacgaagaagcaactgttggatttgcaaattaggaggttagtagtggcctagaattaaaatgttttcaatggagtgggagggaaagaagccagagagaactgaagcatgagttagaaaatgcggataacatgtgtagtctattctttacagagacttggccatgtaaggaaagaaagaacaatggctggcaaggagagagaggtactgtgtaaattgttattattttggatggtgagacttgtgggcccagaagaaggatccagttgcaaacaaaaggtcggaagagcacaaccagcaatcatttccaaccttctccttgcctgcctctcattattgaggctgggaaggaaaaaaacaaacaaacaaaatacaaacaaataagaactttcccagactactgtacccactctccttcaagatctgctctccttttcttttcagtaacagaatctggactctgagctgggcacatgaccattctaaataaaaactaatttcccaagcttccctcaacttgttgtggcctgtggctaaatattgacctatgggttgtaagcaaaagtaatatatataattccagaatgtgttctagaggagggaagcttcctttctcttactctttcctgctgtctggaatgtagatgtaatggctagaactggagcagccrtcttggaccatgagctggaagargcctaatttcctgagtacttagtgaagtagagcagctccactggaaattacatcccatagggcaagtagatctgttcagaaagagctgggatttggtggatcaargtcctggaggatcaagaaaagatggatcctgaagtccatgtatacctacatgtataccagggttgaatagatacattaattctctattatagattatataaatattatgtattctatacatgtacaggaatccctctttagccatggtttcacttacccacagtcaatgcagtctgagaatattaaatggaaaattccagaaataagcaatttgtaagttttaaattgtgtaacatcctgagtcacatgatgaagtcttgcgctgtcccgctcttacctgcctgggatgtgaatcatcctttgtccagtgtttccacactgtatgtgccacctgcccattcgtaattgagtagctgtcttagttagaggtatataggatttggtgctatccgtggttttaggcatctctgggggtctttgaatgtatcccccttgggtaagggagcatctgttgtgttatagamagctctattggacagtgctgctctagactttttaggcatatgttagagaaggtactttcatctctcactacttcctctcctctctgcccactcctccgtatcaaacacccaccagagtcatttacctggactgtttcatttggggttaagatcaagggctttaagacccaataggttgtagctacttaactagttgtatggccttggtcaaattatttatcctctttgaacctcagattctttgtctataaaatgggaataataagagcatctgcttcttagggttagtcaaaggattaaatgagataatatggttccaaagtggcagcaaggaagcaakctggcttcacaccccccaatggaaaacccaaaactaatattcaacactgaaattatcaccagcaatatccgagaactcaaatatgaggatgagacatttgctggggccacagagaagtttaaaaaactctgagcagatggtaagagaatcagacttccatatctgtaatcccctccccacaatctgccaggcaccaactgcatgaaaatttcccccaactcacagtctgtacactgtaaaaagtgagatcaaggcatagacaaccagcttctccacaatcttgggttcccttgcaggagacttgtcccagcctcaaccactagaagcatcagcagtccctagaggagaaatatccctgagaacagccagagacaaaggggagaggtgagactaccatcccagctctggaaactctgctgtgtaacttgacaaaaagagatggagacaccaaatcatagtggctgttcagcagcaccacactgtaggaggttgggtccataggtcccttggacactgaacccctagctagccttcccaaactactgggatatcccccattaaggatgaggggcactgattatttattagaatggaggcaaacgtgggtttcagcaccatctagtgctgaaaatggggcagtgacctagcaaggggggaaaaaaagaaagaaagaaataggtaaatgaaataatacatgtraagtacaggcagtcttcactttgcatgataacactgttctgtaaacatgatatgcaagccaacacccttcaaagtgatctcaattatcagtgggaaaaattacaattgttttgtgatgtttaaaaacttttgtcaaaatattaaaaactttcttactgttggatataaatatatagagaaatgaaaaaattgtaaacctaatatttctttattatgccataatttaaaacagaaatattgagaattaatgtgttttgcttttttttttttgagacagggtctttgtcacctgagctgaagtacagtggcatgatcacagctcaccacaaccttgacctcccaggctaaagcgatcctcccacctcagccttctgagtagttgggaccataggtacataacaccacacctggctaacttttttattttttgtagagacggggtctccctatgttgctcaggctggtcttgaactcctgagctcaagcctcagccttccaaagtgctgggattacaggtgtgagccaccatgcccagcctcctttctaagttttcctttgtgctttcaatgttgtgagatatctttcagcattcctttaatgtgaattttttgcccatgtcactttctggaacatctttatccttttccttacaacttccttccttatttgtgttcataagtttacctttactaagtctctctggatgcccatctggagttgaacagtggcaatgtcaacattcccatggccaccaatttcttctgtaactccagtgatctttgatttgaacttcactgccacaataatcactttttgtttctttgcttcacttttatctttattggcaaattctatcgtccattttttacaatgttacttggagataaagaggcaacacaactacatgctttgctgtctgtgcataactaaataacagatgtccagtgaccagtcaccagcagactagaaatgaagtgatgtgctgtggtcactgaccatggcgtgcatctgttatttacatagtaattttgtggactgaaaacctggcagcaaagcttgtatttatgcaattacttacagtgaatatactgtggtaactgaaatttgaactgtattattgggggacttgtgttatataactaaacggtgctaattgaaatctgtgctgttaccatgccaagcaaggactgtgctatacttacgcaatgtctgacatgtagttagcatttaataagtagtagattgttttatttctatcattatcatgattttattatatttctacactttctattcctcctcctgagctgcaggccaaaaagtcaaccctagagtgagaatctggtgctggaggtggcagacagtcctgtgttttcagccaagagtgtaaattgcaatgtctttaatctcaattgaggactcaggccaagggccaaaggcttattgccagaggtctgagaagaggttctggggagtgctagcaagtgggcagaactcgatagcagagatcctgggcagggactgttgccaaggtgagggaaacagatggtgtctgagaggtctgtttacagattgcagggctccagccatggatcttggctgaagctatgtccaaagcatagagagggcagctggcaagagcaaggcagggctccaggctagatagaacctaacttaattgccagaacagggaactgggccaaggaagaaaaacagttaccgcatgcgggagagagggaactcaagtgtgagactcaggtgctggagcaattgctgcagttcagggagtagcaggggaaagcaagagcaccgaagctcagggcaacaggaagatgacctgcaactgaaccacaccaggcaaaagagagggaattgaggctgctatggtaattcctgccccatatgtgtgatcttggagcccagccatgggagacaaacgtggcaaagaggcttgtcagcctgacccaatgtggtaattcatgtactactacagaagacttattcctttcctcccaggcaaacttatcagctttaatagattttatctaggaccttatctaaaagttatatactcagtmaaggcagacccagttagcaagaagaaatgatgaacatctgaccttcaactagtaagaaataaacatggaataatagagactaagatacatgttttgttgacaagtgataccacaaatataaaatgcatgtgaaatgcatacatattgcatggggttgcactcaggcatgtaactaaatctaaccaaacttagttgaccacttaagggtttattttcctcacatagcaagattttccatgagtagttagttcagggctgctgtggtgattctctgccatctttagcatatgccaggctgcagaatgacagagtgccagggaccccattcatataatgcaaggatattttccatttacttctacagatctactctccacccttcaacctgttcagtgtcctgagaggctgacctgaatggattatagcacttgagcttcttgccctctgacttctagttggatttggtcaatgggagacactaccaacaggagactgtgaggctggggtaatcagcccctcgtcccttttgtgcagagcaccacaggttggctgtatcccagtgggagggccgctcttgctggccaccctctccatatcctctctccaggtcctggaaaccactctctcttgttgcccttcagagtttggggtggtaataactccctgctattgctagccccagggtactgcatcatctcttaaccatgtttccctgacagtgattacaccttttcaattagtgcctttttaaaaagtctccaccattaccctattggagggagctgtctgtatcctgccaggaccctgactgattcaactctatagtcactgtgcacaaccagtgtggccatatgcagcagcacagtgcrggcctcttatccccatggctgcaaggtggctacttcacacgcaagcttcaaggttggattttaaacaggaagaaagggcaaaagacaccaaagagctctttgccmggaaaacactagctttcraggaagtactagacagcagatgtctgctcacgtgccactctagctgcaggacatccaaggaggagaatcttttcaaataggcattttgctgtccatatgaaatcgtgtttctattagaagggaggaagcagagcaatgaacatggggaggcaggtatccaaaggaaataaaatcagtatttcaatggggaggcagatatctctttgaaatactgattttatttcctttggatatctgcctccccatgttcattgcagcattatttatcatagtcaagatatggaatcaacttaagtatccattgatgggtgaatggataaatatattgtggtacatatatgcaatagaatattattcagccatataaaggaaatcctgctatttttgacaacgtggatgaaacttgagggcattatgctaagtgaaataagccagatacagaaaaacaaatacatacaattttacttatatttgtaatctaagaaagtcaaactcatagaagcagrgagtaggtggaatggtggttgctagggtgaggggatggggaaaatggggagatgttagtcaaacagtataaactttcagttatcagatgagcaaattctggggatctagtgtagaaaatgggtggtgttggatgtgttaattaatttgattttggtaatcattacacagtgtacatgcatatcaagtcaacaccgtacatcttgaatgtattcagtctttctcagttaaatatttaaatttaaaattaaatattcaattatatattattcaataaaatcaattacatgttatagttcaatttcaattaaatattactttttttttttgagacggagtcttgctctgttgcccaggctggagtgcagtggcgcaatctcagctcactgcaaactccgcctcccgggttcaagccattctcctgcctcagcctcccgagtagttgggactacaggcgcctgccactgtgcccagctaattttttatatttttagtagagacagggtttcactgtgttagccaggatggtcttgatctcctgacctcgtgatccacccaccttggcctcccaaagtgctgggattacaggtgtgagccaccgcgcccggctaaatattacttttgtttaaaaacaacagcaataataacttccatttcttgagtccttattgagtgccttacatgcatgatgtcttttaacccacacaagagtcctattagtagtccccacttaacagatgaggaaactggaggtaagacctgtgctcacactaggtatgtctgtctccaaaggccactctggtgtcatgcatatcctctgtttcttttctcatttcttccccagggaaaatctgtgcatacagtgtggacatctaagtcatacataacaagcctatcgcatccttggagcatggcacagcaggaataaaggagaaagaagctggaatcasacagtgggggtcagggagaagatctataacattctgctaggtggatgagagattcaaaggagatgacatgatctgtgaargaaattgcactgggcasgtgtcagctcakgctgctgtccacatgatgcctgggacatgtctgagggactakcctgctgcaagttaacagcacataattctggaagggcggtgggaaaccctgagccagaagtggttcttattttcgctcatgtgtgtgcagtgagtatttagagcataggatattgtgctgcccctgaaccttatgacttcccagaggtgaccaacgttttagctaaaarcatttagctaaatgtttgaatggaattgtgctttaaaataaggtacaacttgctgagcatggtggtgcatgactacagtcccagctactcgggaggctgaggagaaaggcccaggaattcaagtccagcctgggcaacatagcaagacacgtctctacataayaataataataattaatacataaaataaggtacaagatgctgggggtaaagagagaagaggaggggcatcatgtcaagcctctccaggagaaaggacacacctgctggattgtgtgagggatttagaataggggcatataagggaacacagggcagtcaataattctacacaggcagcaaatttgatgctgaaggatgaccaatgtggatgccatgccacttaacgctactgttgcagccgcagatcctaktatttgaaatatgcctcaagaaggaaacacttaagaagtgctgaataagaattccaatcctggcttcatcgctaacttgctttgggaacttgggctttaatttgctcaaagcctcagtttgctcatctgtaaattggggcaaataacatctgttcaacttacctaccagaaatgttgtgtggctaaaaagaaatagaagatatgaaaatgctttggctatattcaaagttctatatacatggaagatattcaggatcctcccaccttcaaagttcatatctaagaaaacccctactaaatcctttagaatggaactgctcaatatagtagccactagccacattgactactgagtacttaaatgtgactagtgcaactgaggaactgaatttttaattttatttaactgtaactaattttaattgaaaaactgatactctattcaattactggaaaacttttaagtacatttggaccaacctggactcgtgaatttacttttgttcccagtgtttttttctatttttttattgataacataatagatatacatattttgagtgtgyattcaaacatttaatattaatacattcatataatttgtaaagatcaaatcagtgtaactgggatatccattaccttaaatgaatctactttttaaatggtatttataaaatctaaatatatgtgaagtgtttctgcttaaatttagtgtttgaattgagatgtgctccaagtgtacaacacacaccaaatttcaaagacttagttaaaaaaaaaacactgggaagggcaggaggaagggagagatagggagagatttgttaaaggatataaaattatagctagataggaggaataggttctagtgtagtatggccatagttaacaataatatatagcttcaaagagctagaaggaggatattgaatgtttccaacataagcatcaatatttgagattatagatatgctaattacagtgttctgatcactatacattgtatattgaaacatcaatatgtaccccatgaatatgtacaattattacatgaatatgtatcaaaacaaattaaatttaaagacaaaacaaagaacataaaacatcttcttaataatgttttatattatgtgttgaaatgataacatcttgtatatattgggtaaagtaaaatatatcattaagataaattttacctctttgtacttttttcttaatgtggctactagaaaattttaaattatagccaggtgtagtgatgtgcacctgtaatctcagctactcaggaggctgagacgggaggatcgcctgaaccttgaagttcacggctgcagtgagctgtgatcacgccactgcactccagcctgagtaacagagcaagaccctgtctctttaaaaaaaaaaaaaagtaaaattggccggatgmggtggctcacgcctgtaatcccagcactttgggaggctgaggcggcggatcacctgaggtcaggtgtttgagaccagcctggccaacatggcgaaaccccatctctactaaaaatacaaaaattagctgggtgtagtggtgggcgcctgtaatcccagctactcgggaggctgaggcaggagaatcatttgaaccggggaggcggaggttgcagtgagccgagatctcatcactgcactctagcctgggagacagagggagactccgtctcaaaaaaaaaaaaaaagtaaaattacagggtggcttgcattttatttctgttggagagcaccactttagaaagagacagtgagcagggagatccttatatccttataggaaataggaagaggagccattgcagaaataaattctgtgatcccagacaaagtgctggcaccatctcccgggtttgagaacmcaccgcagagatacagaacagcgcagattgctgttgaggtcagctcccagctccctgcctcattcctctctgattcctcttttgttcaggcacaaaaacactccatcctgaaacttttgtcattattgccttggtagaagaagaccacagttgttacctgggttttgatttggggacaacagcatttcaatgactaggagatttcaggagaagctagtggccatgaagattctcaaaatcagcatgaactttatttttcactggtgttctttcaaagtttgccttcgactcaacgtgtggtagaaattcaccctgaaagcatttgctcttctctggttttgtgtcttttcctccagaacagcgttgttttttgcatgttttgcacttagccagaggaagtctggcgcatccgagccggccagccgagcacatctggaagtggtttctggggccgcccctctctgccagckcaactcctgggttcccagcggcttcgcgcagaggtggaagaaacccgagacgttccgaagtcaacgcaagcaaaggggagtgcgggtcggggaggaatattcttttggaaacgtaatattggccttggggctctccagccctttgggacttccaatgggatcttagaagcagccgaagcagcgtgagggcggcagcccagggccagccacgatttgaacgctctgccttgcagctcttctggaccgaggagcccaaagccctaccctcaccattcaccaggtaaatagagaaatttacgagcagtgtgcagtcgttccgttttatcctggccggtctgcagcagttctttattctgctacagacccaagaaagtaaatcagaggtgtcagattgccccacacaaactttgccttcagaaacttcccagtccgaactggtagcattccagcggaacccttttcggccatttccagcaaatccagtgtgcaatgtttttcacatcctgggctgcttttccagacctgggtttctcctccttctctccacaaatatgataatttactatttgtatcagattttaaacataaaaatcagcagttaggatgtggatgaatgctattatttaatgaaggtatgtcctgagccacaaattatttaactgagcatgattcatgttttcagaatctgccttaggaagctgttctgaggatctccatccccccagaaagaactggccgttgtggaaacccaagtgaggcttattgtaaatacagtagtcgtggtgtttgggttgaaaatgctttttamacattaaaaaagatcttatgtttactttataagcaagtgtcacacattggacaagcctggtatataatttatgaaataagaaggatagttmacatgagagtaaaaaaaaaaaaacctgagagagagtgagagaaagaamacatgatgatatctgaatgtctggatgtgctttgaaaaaaaaaatcagtcctctcgttgtttggcccctgtgcagccaaatatccaaagtgatattggttggtttttgtcttttccttttcctccaaatgttctggtgtggcacttctgtgtaatatcctttctatattacataatggaattccagttctccctttaatgcacttggaagtagactgtgcaatgcaktggtaagaacataggctctggggtcaggcttacaggactgaatctacrtgctgccacttacacaccttytaagctcgactccgggtgaattgtttaactgcatgcaccctagttcctcatctgtaaaatggaaattacatgacctaatgtctatagaggacataatacaggacctgcaaagtagttaggcctcaggaaaggttagcttctctgatggtgctgatgatggcagtggtgacaaaagtgatcatgcatcctgtttttggcaacacctctgcttttgaccatggttccctctgacagtccagtggtccaagtgttcctcataccctaatatgtcatctctccagcactttgctttcttcctttcttccttcagacacctctctttcttttatttcccattctgtctttcattatttcttctttgtgcttcctctttccttgctgagaaaatgtgaggttcattaaggcacagccctcatagttttcatttctagttcccgaggaaaatgattctaaatcctttttaatttcagcattttccaaagaaagttctgagaaaacatagtcccatgggaaactctgtgaactatattaccctcttagagatcgcaaggcataatagcattttaaaggtcctgagaagtcctgtagtagagaaatcctcttaaggttgtttaacgcaatgattcccaaacagttgatcgctgaaccaccttatcacataatgtaggttaacatttctaggagcacactctgcggtgtgctattctggacacacttgttttcattttggttcctcttttggacatcctattctccaccttccctggagctcatccaaggggatgccttgtttttccttctcaagttaaggacataagattatcatgtgtgttgtactggtatatagaaaatctggcctaaattggagatcagaagtcagcaaactttttctgcaacgggcctgataataagccatatggtttctgttgcaactgttcaactctgctgttgcagtattaaaacagcagagaaacaaaaaataagcatggctacgttctaacaaaactttatttacaaaaactagtgtcaggcaggatttgaccaggggtcatagtttgctgacccctactctaaaggctttttgtgaaagaatttctcatgctagcacaggagaaagcaagacaaattctctataaactgaagactctcttgtcctgcacccctagtgctatggtctgaaggtttgtgtccccccaaaattcatatgttgaaactctaacccccaaggtgatgctactagaaagtggggccttttgggaggtggttgggtcatgagggcagcaccatcaccaatgggattagtgcccttgtaaaataggcctaagaggctgggcacagcggctcacacctgtaatcccagcactttgggaggctgaggcaggtggatcacttgaggtcgggagtttgagaccagactgaccaacatggagaaaccccgtccctactgaaaatacaaaaaattagccaggcgtggtggtgcatgcctgtaatcccagctatttggaaggctgagataggagaatcacttgaacccaggaggtggaggttgtggtgagctgagattgcaccattgcactccagcctgggcaacgagagcgaaactccatctcaaaaaaaaaaaaaaaaggcctaagagagctggttcaccccttccaccatggaggacacagctagaacgtgctatctatgagccagaaagtaggcccccaccaggcactgaatctgccagcaccttgatcttgggcttctcagcttccagaactataagaaataaagttttgttgtttagaagccacccagttcaggctggcatggtggctcatgcctgtaatcacagcactttggragggtaagrtgggaggatctcttgaggcccagagttctaaaccagactaggcaacatagcaagactctgtctctacaaaaaaaatttttaattagctggatgtggtggtggtgcatgcctattgtcccagctatttgggagactgaggtgagaggacagcttgagcccaggaattcgaggctatagtaagctacgatcatgccaccacactccagcctaggtgatagagtaagaccctgtcaaaaaaaaaaatggagtaagacacctgttctatgtatcttggtgaatcttgagtaaacctttcattatagcaaaaagttaaaaggcaagagatattttgttagaggacagactcctgagtcctgatcttgtcctttctctttcctttagtgaattcttactcttgtcctgttaatgactttgtagcttgcatagcttaaaatgaagtgctctgttaaatgtgtctatgcatttgagaacttcagggtgcaagtcttgcagagttaactcacagagcttatgtcagttgcttgacacagtgatagcaaccatagcgatggaaagtggttggctgtagtaactatcaaggtggttaagaatgtgaactcagagccaggatgcctgcgtgtaaatattagctctgccacttattagttgtgtgacccttagcagacctcttaattctctgagcctcagttttctcacctgtgtattggaataataactttaaggagttgttgtgataatccgtgaatgaatatttgtaaaagtcgtagaacaatgcctagcacatagaattgctacgtaagtgttaaaataataatagttaatacttatgtagcaatagctttgtaatatgcagaactatcccgttttacacatagggttttgtaagtcaccccatgattacacagctaattaggattcacagtcagctctgtctaaggataaagcccatatttccactaacctacacagctctcatatttaagtcattcaacagtacttttaggaaccccctcttttatcttgctttttgattcccagtcatttcctattactccctaccatactataaccatggcagacatgattaatcaatcactttctttctttctttctttcttatyttmtttctttctttctttttctttctttctttctttctttctttctttctttctttctttctyatctttcttttcttttcttttttaactgaatctagtgatggcttcagatttcttctcaatctagcaatcccaacagcccataccatagccaatcagagctggcatgtraaatgaaacacaggggcactgatttttggagtatttttctgaagagcctttcccactttgctttttgttccaaggcagagcaaattcccttagccactgccaggtctcaaaacattctttccaggtttggccacatgcctaaactctttggcatctggtaaaatggctccccatgcaaggtcttcaggggcttatttttaaacttacaggcctcttctcatgcccagaacaactctctgtactctccttttcttcctactcacaggccctakaacctcaaccttcttttctcccctctttgaagatgctactgcccagtgccttgcctgccctgcagtggctcccagctccacctctctgtctgtcctgaagacaggcctgcaggcaatttcttgttaaaggcttggctatttattaccacasagaaaccacacacacggaagtcactakggctakgaaagctcacasaggtgtaaggggcacagttctggggctctttgttgtgacagtagcaggaaggctgatgagatgaccagagccctctgcttttattcctggagtgggatcatcagcagttcccctccttctggctgagtcctttctttctggggctgaagagcagagcaacaagagcctctcgccttttctttctctctcctgattctcattgattcaacacacatttattgagttcccaccttggggcaggacaggcagatggaagtgaggaagccacagtcgctgtcctcagtggtctgtctggtccttcttttaaagatagatatgctgaaatatttagggggagaagtgtcatgatgtttacaacttccaaaaatatatatgtacatatgaagttcaattaagtaaatatgtcaacatgttagcaactggtggatctggtgaaaggtatatgagtatttattcttcagacttttcagcggtcttgaaatgtttcaagcgaaaaaaagaaaaaggaaatcaaacaaaaaattaaggctactcaagctgcatttgtgtttcaaatgaacttgatatgattatcgaacaacaaaaaagttactatggccgttaggccagtgatggattgaggaagggsagtgtacagaaattctaaaggcaggaaggccaggtgggaggttattgcagaggtgtaattagtaggactcggtgattgaaggaggaattaggagggagaagttgaagaggaatctgagaaccccagagaaggagtttctgtaggggaggtgctaatttcagttgtgaatgtaggggctttgagatacttgtgcagcaccctgaggagacagttgcacattcatccctttggtccataaatgttttctgagggcttatattgccaggcacttgtctagatgctgggtgtatggcaatgaatgaaacaaaatttcctgccttcatggggcttatagtctgtcatttggatggcagccagtacaccggtgatgacgaggcagtctgttggaagatggtaattgctgaggggatgcaatttgtgcattgttggggttagaggcttttgactaagagactgagagacatgagggggcaagccatgtagatatctgggaagaggattccaggcagcaggaatagcacgtggccaaggctctgaggcaggaggctgtctggcaaggaggccggtgtgatcacgcgataccttatggaaggatgctgtaatgactttggtttttgctctgagagagacaggaaggccttggaaggttttgaacagagcacagcacaatgcgactcctattttcacaggttcattctggctgctttgttgaaaatcagctgaagggagacaaaggcagaataatatagtcaaaggctaatgtgccagggtggagccacagaaggtggtaaaaattctggatctattttgaaagtggaactgacaagatttgctgtcagtgcacatgggaataaggaacagagaggggttaaggaaacaccaagctgatttttttgtggagcaatttaaaaaacggagtcacagccgggcacagtggctcacacctgtaatcccagcactttgggagaccaaggtgagtggatcacctgaggycaggagttcaagaacagcctggccagcatggcgaaactgcctctctactaaaaatacaaaaactagctgggcgtggtggtgcacacatgtaatcccagctactagggaggctgaggcaggagaattgctctaacccrggaggcggaggttgcagtgagccaagattgtgccactgcattccagcttgagagacagaacaaaactccatctcaaaaataaaaataaaaactaaatggagtcacccgaactgatttggggaagattatgggaagggcatgtttcgggggaaataccagaagctcagttttggacacgtggattactataagtgcagatgccaaatggcatctggagtctggaatccatgtgagatggctggcctggagatagaaatttgggagttttcagcatataaattatatttaaagccatgagtcaggatgaagtctcctaaggagggagtttagagaaagaagagaagaaatcgctaaggtgttccaacatttagatattcaggaggtaggagcaaccagtgaaagagactgagaatgagccatcagaaaggtggaggaaaagcaggtgagccgagtcccccgggccacgtgcaggaagcatgtaaggaggagagagcgggcacatagtctgcatctcacgcacccatgcctcaaccctagtgaggaacaagtcctgtggtgcagttctttgcatgccgggaccttgttagccagaagatgttctctcagactctgccccattccagtttctcttggttccagatctctgccttttactctacctcaagcttgtccaacccgtagcccacaggccacaggcagtgctggacagctttggatgcagcccaacacaaattcatcaactttcttaaaacataatgagatttttgtgtgtgtgtgattttttttgtttagctcatcagctatgtttcatgttagtgtattttatgtgtggcccaagacaattcttctttcagtgtggtccagggaagccagaagataggacaccccaccctacacattcttaagctgtccagcatcacttccttggttctccagttctctatccctgacttcctatcagttttctacctctttataactctgatccctctcttaattccccacaatcagcttatccccaggacttcagttctgcaaaaatttcttgagaacctacttaatctactggaatgtctttgacttcaaataccagaaacactgatttacggcagcttaaacacatgggttgattctgtcacataagaagtttggaggaggtaggtattgatggcattgattcagcagttcgatgacataagagctgaccattctgtgtagctcttgacctctccctcatggtctcaaggtggctgcctagctccagccattatggccccatgcaaggcaggaggaagggggagttgacacttcatccagaaaggaaaagctttctcagatattcccagtagatttccacttaagtctctgtgcatcagatctatattatgtggctactactagctgcaaagaaggctggtaaaatctttatttggattttcctctctctcatatggaaacaggcaaaggagaaaaggatgggaagagctgttggatcagccagctatcaaggctgccacactaccaagtgccaaatgcttgccatgaactggaaatacagaaatgattaacgtagtacccgtcctgtccctggagcttgcgttctagtaaggaaacataagaatgaacggagtatcttggtttggtttggtggagaccaggagccttccctgacccccatgatctggtcaggtgcccctccttgatgctaaaacaatatcccatgcttacatctaccaaggcatctaagcayactgtattgccattatatatttactggtgtcttcccctcccttcccccaaatgtggactaactggggacttatctttgaatctctagtgcctgggtgcctggtatattcgtagaggttgagtaaatgtttgttgaatgaatcaaagaaatgtcaagggarccccctaattaccttcttgtcctgggttgggcccttatcccatcttagctttgttgttgttgctgttgttgttgagaaagagccttgctttgtcacccaggctggagtgcagtggtgcgatctgtgtttactgcaacctccgcctccctggttcaagcaattcccctgtctcagcctcccaaggagctgggatcacaggtgcgtgccaccacatccaactaattttttcttttttgagacagagtctctttctgtcgcccaggctggagtgcaatggtgcgatcttggccgactgcaacctctgtctcgcaggttcaagcgattctcctacctcagcctcctgactagctgggattacaggcgcctgtcaccacgcccagctaatttttgtatttttagtagagacagcgttttaccatgttggccaggctggtctcgaactcctgaccccagatgatccacccacctcagcctcccaaagtgctgggattacaggggtgagccaccacgcctggccccacacccagctaatttttgtatttttagtagagacggggtttcaccatgttggccaggctggtctcgaactcctgacctcaagtgatctgcccacctaggcctcccaaggtgctgggattacaggcgtgagccaccgtgcccagccccttagcatttttagctagttaactcatatttacattctaatagcaaaatctctaacaccttgccagaaaacagtgctgactccccaatcacttttgtaatgttaaaaataaatttatttattctcacattcagtagaactctgaacttacaaatttacacccagtaaagtcacaacacagcatctaaaaagctaaaagtacctatatactcgagtctcatagtacttagaaaatgggatgcttaatttttcaatttgttaggctgggcgtggtggctcacgcctgtaatcccagcactttgggaggctgaggcgggtggatcacgaggtcaggagttcaagaccagcctggccaagatgctgaaaccccatctctactaaatatgcaaaaattagttgggcatggtggcacgcgtctgtaatcccagctactttggaggctgaggcaggagaatcgcgtaaacccgggtgccagaggttacagtgagccaagatcaagcgactgcactccagcctgggcgacagaacaagacttcgtcccaaaagaaaaaaaacatttttttttcaatttgttgttttttatttcaaagagatgtatagttaatctgactcatttgaataacagtgagtgaattgcagatactgttatcaaagatagcaattctacaggcataaataatttttttattattatactttaagttctagggtacatgtgcacaacgtgcaggtttgttacataggtatacatgggccatgttagtttgctgcacccattaacttgtcatttacattagctatttctcttaatgctatccctccccctgctcccaccccatgacaggccctggtgtctgatgttccctgtcctatgtcctagtgttcttattgtttaattcccacccatgagtgagagaacatgcagtgtttggttttctgtccttgtgatagtttgctcagaatgatgatttccagcttcatccatgtccctgcaaaggatgtgagctcaccttttttatggctgcatagtattccatggtgtatatgtgccacattttcttaattcagtctatcattgatggacatttgggttggttccaagtctttgctattgtgaatagtgcagcaataaacatacgtgtgcatgtgtctttaaagcagcatgatttataatcctttgggtatatacccagtaataggatggctgggtcaaatggtatttctagttctrgatccttgaggcatcaccacactgtcttccacaatggttgaaccagtttacactcccaccaacagtgttaaagcattcctatttctccacatcctctccagcatctgttgtttcctgactttttaatgatcgccattctaactggtgtgagatggtatctcattgtggttttgatttgcatttctctgatggccagtgacgatgagcattttttcatgtgtctgttggctgcataaatgtcttcttttgagaagtgtctgttcatatccttcgcccactttttgatggggttgtttgtttttttcttgtaaatttgtttaagttctttgtagattctggatatcagccctttgtcagatgggtagattgcaaaaattttctcccattgtgtaggttgcctattcactctgatggtagtttcttttgctgtgcagaagctctttagtttaattagatcccatttgtgtattttggcttttgttgccattgcttttggtgtttcagacatgaagtccttgcccatgcctatgtcctgaatggtattgcctaggttttcttctagagtttttatggttttaggtctaacatttaagtctttaatccatcttgaattaatttttgtataaggtgtaaggaagggatccagtttcagctttctatgtatggctagccagttttcccatcaccatttaataaatagggaatcctttccctatttcttgtttttgtcagatttgtcaaatatcagattattgtagatgtgtggtgatatttctgaggcctctgttctgttgcattggtctgtatctctgttttggcatcagtaccatgctattttggttactgtagccttttagtatagtttgaagtcaggtagcgtgatgcctccagctttgttcttttggcttaggattgtcttggcgatgtgggctcttttttgattcatatgaactttaaagtatttttttccaattctgtgaagaaagtcattggtagcttgatggggatggcattgaatctataagttaccttgggcagtatggccattttcacgatattaattcttcctattcacgaacatggaatgttcttccatttgtttgtgtcctcttttatttcgttgagcagtggtttgtagttctccttgaagagatccttcacatcccttgtaagttggattcctaggtattttattctctttgaagcaattgtgaatgggagttcactcatgatttggctctctgtttgtctgttattggtgtataggaatgcttgtgatttttgcacattgattttgtatcctgagactttgctgaagttgcttatcagcttaaggagattatgggctgagacgatggggttttctaaatgcacaatcatgtcatctgcaaacagggacagtttgacttcctcttttcctaaatgaataccctttatttctttctcctgcctgattgccctggccagaacttccaacactatgttgaataggagtggtgagagagggcatccctgtcttgtgccagttttcaaagggaatgctttcagtttttgcccattcagtatgatattggctgtgggtttgtcataaatagctcttattattttgagacacgttccatcagtacctagtttattgagagtttttagcatgaaaggctgttgaattttgtggaaggccttttctgcatctattgaaataatcatgtggtttttgttgttggttctgtttatgtgatggattacgtttattgatttgcatgtgttgaaccagccttgtatcccagggatgaggccaacttgatcgtggtggataagctttttgatgtgctgctggattcagtttgccagtattttattgaggatttcgcactgatgttcataagggatattggtctaaaattctctttttgtgctgtgtctctgccagactttggtatcaggatgatgctggcctcataaaatgagttagggaggattccctcttcctctattgattggaatagtttcagaaggaatggtaccagctcctttttgtacttctggtrgaatttggctgtgaatccatctggtcctggacattttttggttggtagactattaattattgcctcaatttcagagcctgttattggtctattcagagattcaacttcttcctggtatagtcttgggagggtgtatgcatccaggaatttatccatttcttctatattttctagtttatttgcatagaggtgttcatagtattctctgatggtactatcggtggtgatatctcctttrtcattttttattgcgtctgtttgattcttctcccttttcttctttattattcttgctagcagtctattttgttgaccttttcaaaaaaccagctcctggattcattgattttttgaagggttttttgtgtctctatctccttcagttctgctctgatcttagttatttcttgccttctgttagcttttgaatgtgtttgctcttgcttctctagttattttaattgtgatgttagggtgtcgattttagatctttcctgttttctcttgtgggcatttagtgctataaatttccctctacacactgctttaaatgtgtcccagagattctggtatgttgtgtctttgttctcattggtttcaaagaacatctttatttctgccttcatttcgctatttacccagtagtccttcaggagcaggttgttcggtttccatgtagttgtgcggttttgagtgagtttcttaatcctgagttctaatttgattgcaatgtggtctgagagacagtttgttgtgatttctgttcttttacatttgctgaagagtgttttacttccaactctgtggtcagttttggaataagtgcagtgtggtgctgagaaaaatgtatattctgttgatttgtggtggagagttctgtagatgtctattgaggtccacttggtgcagagctgagctcaagtcttggatattcttgttaaccttctgtctcattgatttgtctaatattgacagtggggtgttaaagtctcccattattattgtgtgggagtctaagtctctttgtaggtctctaaggacttgctttatgaatctgggtgctcctgtattgggtgcatatatacttaggaaagttagctcttcttgttgaattgatccctttaccatgacgtaatggccttctttgtctgttttgatctttgttggtttaaaatctgttttatccgagactaggattgcagcccctgctttttttttgctttccatttgcttggtagatcttcctccatccctttattttgagcctgtatgtgtctctgcacatgagatgggtctcctgaatacagcacactgatgggtcttgactctttatccaatttgccagtctgtgtcttttaattgggacatatagtccatttacatttaaggttaatattgttatgtgtgaatttgatcctgtcattatgatgttagttggttattttgcccattagttgatgcagtgttttcctagcatcgatggtctttacaatttggcatgtttttgcagtggttgatactggtttttcctttccatgtttagtgctcccttcaggagctcttgtaaggcaagcctggtggtgacaaaatctctcagcatctgcttgtctgtaaaggattttatttctccttcacttagtttggctggatatgaaattcttggttgaaaattcttttctttaagaatgttgaatattgccccccactctcttmtagcttgtagagtttctgctgagagatctgctgttagtcygatgggcttccctttgtgggtaacctgacctttctttgtggctgcccttaacattttttccttcatttcaaccttggtgaatctgacaattatatatcttggggttgctcctctcgaggaatatctttgcggtgctctctgtatttcctgaatttgaatgttggcctgccttgctaggttggggaagttctcctggataatatcctgaagagtgttttccaacttgattctattctccccgtcactttcaggtacaccaatcaaatgtagatttggtcttttcacatagtcccatatttcttgtaggttttgttcatttctttttactcttttttcttttaacttctcttctcactttatttcattaatttgatctccaattgctgataccctttcttccacctgatcgaattggctattgaagcttgtgcatgcatcacatagttctcgtgccatggttttcagctccatcaggtcatttaaggtcctctgtacactgtttgttctagtttgccatttgtataatcttttttcaaggtttttagcttccttataatgggttcaaacatcctcctgtagcttggagaagtttgttattaccaaccttctgaagcctacttctgtcagctcgtcaaagtcattctccgtccagctttgttccattgctggcgaggagctgtgatcctttggaggagaagaggcgctctggtttttagaattttcagcttttctgctctggtttctccccatctttgtgattttatctacctttggtctttgatgttggtgacctacaactgagattttggtgtggatgtcctttttgttggtgttgatgctattctttattgtttgttagttttccttctaacagtcaggtcccttagctgtaggtctgttggagtttgctggaggtccactccagaccctgtttgcctcggtatcaccagcggaggctgcagaacagcaaatattgcagaacagcaaatattgctgcctgatccttcctctggaagcttcgtcccagaggggcacccacctgtatgatgtatcagttggcccctactgggaggtgtctcccagttaggctacatgggggtcagggacccactgagggaagcagtctgtctgttctcagagctcaaacaccatgctgggagaaccactgctctcttcagagctgtcagacagggatgtttaagtctgcagaagtttctgctgccttttgttcagctatgccctgmccccagaagtggagtctacagaggcagctggctttgcggagctgtggtgggctctgcccagttcaagcttccccacccactttgtttacccactcaaacctcagcaatggtggacgcccttccacctgccaggctgctgcctcgcaggtcgatctcagactgctgcgctagcagtgagcaaggctccatgggcatgggccccaccaagccatgcacaggatgtaatctcctggtgtgctgtttgctaagaccactggaaaagtgcagtatttgggtgggagtgtcccgtttttccaggtaaagtctgtcacagcttcccttggctaggaaagggaaatcccccgaccctttgggcttctcaggtgaggcaatgccctgccctgcttcggctcaccctctgtgggctgcacccactgtccaaccagtcccaatgagatgaacgaggtacctcagttggaaatgcagaaatcacccatcttctgcatcaatcacgctgggagctgcagaccagagctgttcctattcagccatcttggaatggaatccaggcatacataatttttaaggaagtaagcatgttcttgtaaatattgtctgaataattaaaatgacataaagttattgataagaacattttatcaaatattagttctcaaataagagttttttgtttgctttcttcagctttattgaggtataattaacaaataaaaaatgtatatattcagccaaccctggtagctcaagcctgtaatctcagtgctttgggagaccaaggtgggaggattgatagaacccaggagctcaaggttacaatgagctatgattgcactactacactccagcctgggtgacaatcctgtctctgaaaaaaaatatatacatatatatatatatatatacacacacacacacatatatayacacacacacacatatatatatattttcaaggagtacaatgttttaatatacacattgtgaaatgattaccacaatcaagctaattaacaaatccatcaccctcacgtagttgccttttgcgtatgtgcagtgagaactcttaagatctaccctcttagtagatttcaagtatacaatrcattattagtaataacagtcaccatgctgtgcattaggtctccagaacttgctcatcttataacggcaagcttgtaccctttgaccgacatttccccatttccccacctctctgtccctggtaaccacccttctactctctgtttctgtaagttcaactttgtagatttctcatataagtgaacatgctgtattcatttttctttacctggcttatttcacttagcataatgtcctccaggctcacccatattgtcacaaatggcatgattttcttcttttctaaggtgaaataatattttattttgtgcatatatatgtctacatacacacacatactcatatatataccacatttctttatccactcatccatttatggacacaggttaattccatatcttggctattctgaatagtgctgcgggctgggtgcggtggctcacacckgtaatcccagcactttgggaggctgaggtgggcagatcacctgaggtcaggagttggagaccagcctggccaacatggtgaaaccctgtctctactaaaaatatacaaaaattagccgggcatggtgatgtgcacctgtatttctagctacttgggaggctgaggcaggagaatcgcttgaaccccggaagcggaggttgcagtgagccaagattgtgccactgcattccagcccaggtgacgatataacgaatcactgtctcaaaaaaaaaaaaaaatagtgctgcaatgaacctgagagtgtagatctagctttgatactgattttctttcctttggatatataccctaaagtaggatagctgcatcatatggtagctctattttgaattttttgagagacctccatattgttttccataatggctgttccaaattacattcccactagcaatgtacaagggttcccttttytytgcatcatcaccaacacttgttatcttttgactttttgataatagccattytaacagatgtgaagtgatatcctattgtggtttggatttgaatatccctgattattagtgatgtttagtatcttttcatatacctcttggccatttgtgtgctytytttagagaaatgtctattctggtcctttgcctawttttttttttttttttttttttttgctattgcacatcactcctttattatactgatatggaaaaaggatttagtacagttatgctcaratgaacactggacccatgtggcagggtcaagcaactagaacatgattcagaaatcagtgaaagatacacttggacaggaccaagaggcatttcactgccatgaaacaaggcaggaagggattctaatacacaaaccaggaagcactcctgcccctcagaggtcaaggagctgatcctatattggtatgaggaatggcttattttctgatgaccacatgtgggactatttcaaccgccacaagaaaccccagaagggttattgttttgtattatttatatatactatacttttttaataaaagtaaattaacacataacgaaattcaggattgatcccaacctagagccagatcctctggggtcagggaggaaacagttgtcacatcaccacgcaggttacattcgtcttccactggaatgactagagcccccaggcagtaggcagtgacctgactgcagaagagcagaggacagactccgctcatggggacagacaggctctgttgcttctyctcactggtcatggcttagcatggttcctccccaaagtccttagtaaacaaagcactcgcaaaaacccaagtcactacttttaaactctgttggataaggggagcttttccatagcttagactgagaacctgtgctctagaactgctattctgactagattgtatgaagggagtgggtgcaggcgacaaaatggctaaaatgaaaatgggagccactggtccccatctgcagctacaactcaagatgtctacagatgtggtcagtgtgacatgtgcasgtgggaggggcagagggacaagatgggcagggagggtgctcctggggacagtatcytccccgccggccttcacttcttggccttgccctgggcagccacagcttccatggctttgcgcaccgtctcytcatcccccagaaactgcatgggcttgataggcttcaagttcttgtccaattcatagacaatgggaatmccagtcggcaggttcagctccatgatagcctcttcagagagaccctccagatgcttgacaatgccccggaggctgttgccatgggctgcaatcagtacacgtttcccctccttgatctggggaactatttyttcattccagaagggcagagctctggcaatagtatccttcagactctcacaggagggtagctgatsttctgtgaggtctgcayacctgcgatccttactgatgttgctgtagaaaggatggtcgggctccatcggaggtggtgggacatcataggagcgcctccagatcttcacctgggcctcaccatgctttgcagcagtttstgctttattgagaccggttagacccccatagtgccgctcattgaggcgccaagtcctcaccactggcagccacatctgatcaatggcatctagcactgtccagagggtccggatcgctctcttctgcactgaggtgaagcagatgtcaaactcatagccagcatctcgtagcgcctgcccgccgcgcttcgcctcctcgtggcccgccgggctcagrtcggcgtcgtaccagcmgctgaagcggttctccaggttccatgcgctctcgccgtgccggatcagcaccagtttgtaggcggccatggcggcgggctggggatgcggcaccgactgggattagcagattccggagtcctttgcctatttttaaatcaagttatttgtttttttgctattgagttgtatgagtttcttatatattttggatattaacttcttatcaggtatatggtttgtaaataatcgctcccattccacaggttgcttttttattttattgattgctcctttgcagtgcagaaactttttagtttgatgtagtcccacttgtttgtttttgtttttgttaactgtgcttttggtgtcatattcaaaaaatcattgccaagaccaatgccacagagctttccccctgttttcttctagttttacagtttcacatcttacacatttaattatgttattattaaattaataaataataaaaatgaataattacttatttaatatgtaattcattttgagctggttttgtgtatgataaagatccaatttttttgttgttaatatccagttttcccagcaccacttactaaagagactatcctttccccattgtgtattctttgtgccttatggaagaatagttgaccatatatgcgtggatttatttctgggccctctattctgtcccattggtctatgttccattgatctatgtgtctgtttttatgtcagtaccatactttttggattactataactttgtaaatataatttaaaattaggaaatgtgatgccttcagttttgttcctgctcaaaattgcttcagttatttgggggcttttgcggttccatatgcattttaggattttttttttctatttttgtgaaaaatgtcattggaattttgaaagggactacattaaatctgtagattgctttgggtgttatagacattttgacaatgttgattctttcaacccccatcacttttttgagggcataactatataaagttctagaatgttagatctaatagaattgtctgcttcagtcataataatgargaaactgagacggagagagatggagttatttccctagaatcacacgatcataatggcttgtataagtggggttccaactgtttgccaagtactgttgtaagtacttaatgcatgtaaatgtattactgcatttaatcctcataaagccttatattaccttcatttcctcaactttttatttagaaattgttttaatttatagaaaagttgcaagaagagtataatggctcaaccaatttagccacattagcattgtctcagtacctctcactctctctctttctacacacaaacaaccctgaacctcttgacctttcacccctaaattaatgtatgtgtctcctactatcaatgatatactcctacataaccataccacatttattctctcaggaaatttaacattaatgccataatatttccccaatttcccaaaaataaactttgtagctctttttaaacatttggttcaggatgcagtcaaggtttacacttttttttttgagatggagtctcactctgtcaccaggctggagtacagtggtgcaatctcggctcactgcaacctcagccttccaggttcaagcgattctcctgcctcagcctccgaagtagctgggactacaggtgcacgccaccatgcccagctaatttttgtgtttttagtagagatggtgtttcactatgttggccaggatggtctcgatctcttgacctcatgatccacctgcctcagcctcccaaagtgctgggattacaggcgtgagccactgagcccagccaaggttcacactttccatttcattgttacattatcaagcttatagagttcccaacgtggtttttttttttcctttcatgatattgacatatttgaagagaccagggcagttcgtcttcagaatgatccatgatttggatttgaccatgacgttatccatgatagaatcaggttaaatatcactggcaggaacatattgatatttgtcacacctcaaggcacaggatttcaatttgtttcattttgttgatcttaagtgtgattactttgagaatgtgaattttstgtaccccaacaacattttaccccctatcactttagcattcattgaggttttttgcctgaattacttattaacatgttgattgtaaaatggtattacasacattttataagtgaggaatcttaagtttccaagggaaggggttcttatatggttcttatacattgtgcagctaggatttgaacccargtggtctgactccaaggcccacagtttaatacactaattgtactggaaaaggatttccacatgattttccacttgactttagtgccctcagtcagaaactgtgtcttgtccacttgggatttttttgttttttgaaacccaggaagtgccaccatcagagatgagatgaaattgtaaaaaggaaggataggatgaaattcaggcatgccaaatctttatgcaattatacacacacacacacgcacatgcacacacacacatcattttttaaagcaaactttctgttgaaactgcatgcttctcaaggacaccactcctgccatatggcttaaggtttcctacaataatcagcttcgggaacttaccttcttggctcattactgctgtgccttgcaattggcatgcgattatctgcatcctaaagcttcttgtttcatcttaaagagatttcagagttggcaacacactggacggggaaagatgaaccccctgttcagatgaatcagcayttactattcctctgcctctggagtggtctcatagttacagtaaccgagcactcaggaaagagctgaccagcattgcctgtgagctgtaaagcttcatcaacacacggtgaaatctgttatctggaccccaattctcctaacctctggtgtagccgcaagggccctttgagagctcagcactttgtggttaagggctttgaagtcagagagctctaatttttaatcccagccccatcatttacaagatttatgattttgagcaagttactgaacctctccgagccacaatgtcctcatttgaaaaatggagatagtaatacatccacttgaaaggtgttagaattaaaggagataatgtacctaaatagcctggagctgcgtgcaaattaaattcgcaataaatgatagctatgattattatctgacccctacaaactgctccccatattcacacaccattctggccacagcaaatttatttgtaaagacttttgtttgtaagaaactgaacctcatttcaaaacagtttaaggaaaaattgtgaagttactggttttcataactaggatgtccaggaagtggatggcctgagggacttagagctcagcttccttctggtctttgccccgttctctcctgtgataccagatggcttctttcatggagtgggaggaggagccacatggccaaagaccattctaggcttccatcatccccgaaagttagatgcatacatatcacctaaaatcctaaatggataaaaggtacctgaaaccctatctcagaaaaatcctaagtagtgtgctgttttgacccawttcttttccaggtgcaaaaggggaagaggagaagggtcattgccatgcactcaaagctcttgggtgttcagtctatagcccrggaaaataaaaggaacattgtagctggttgtttacagtgaattaaagagttgaatcaaatctctgttgaagagttttcctagatgactgccagcaaattctcataacactttggttcatgaaactgtggggacctatgatatccttcctttctcaattacctcctcgggctatctctgtcatgttgttagtttctaaaggttattattcctggtttgcagtctgcagcctcccgtcaaatgtcaagttcagaagttccttttaaagaccatagttaagaaggatcaacttaattttaaaacaaactttgagttttcaagacaaattgtttttcatggcaaattaactttttttgtgtgagatagaggaagtcagttgccaactcctggggtaattggcaaaatgtcacaaacaagtgaatgaccataaaaatgtgacaatatttaactttagattttacagtaaaatgaatgttgtcatctaaaatccttatctaatggttaaattttattttttcatcaaacctgtcctatcctatgctttgcttaatgcctaccacttctcctaatgaatatccaaggtattgtattaagcatatagatagatacattgtaaattgggaaaaccgggaaacaaagtcttaacaggtatatttcgagaatagagggagggtgtcttagccttcttgatttcagagcacaaataaaatactccagaatataaagcaaagatcgaattagaatttggggaaatgtttggttgaaagtttttcatggtagatcaacccttttcttgcctgcttggtcctgatagtactctgagaacattattgaattttttttttttttttttgagacagagtcttgctctgtcgcccaagctggagggcagtggtgtgatctcggctcactgcaacccccttctcgcaggttcaagtgattcttgtgcctcagcctcccgagtagctgagattacaggtgtggcccaccacgtccagccaatttttgaatttttagtagagatggggtttcaccatattgtccaggctggtcttgcattcctggcctgaagtgatccgccagcctcagcctcccaaagtgctggaattacagttgtgagccaccatacctggccacattattgaatctttatttgatgatgtagctcactttttagtcactgatgactaatcatatctgtaattcttcctgtagaaagtataggagataataaaaaacctgtgtggatcacttgctcccttctttgggacacatgtcatcctctaggttcaaactccttgccagatttgaagtcccctttgaataccctgaaattggaacaaaatattaaagaaaaaaatcagttccacagaaggaataacaaatggtctcaacaaatggctttctcaacaaatggtcttggaacaactggataaccatatgctaaaagattaagtttaatctacatttcatgatatatacaaaaattaactctgaatgtaaatattaagtccaaaactataaaattctcccagaaaacataggagaaagtcatcatgaccttaggttaggccaaaatttattagatatgataccaaaagcatgatctataaaagaaaaaaaggccaggtgtggtggctgatgcctgtaatcccagcactttgagaagtcaaggcaggcagatcacttgagctcaggagttcaagaccagcctgggcaacatggcaaaaccccatctctacaaaaaatacaaaaattagccaggtgcagtggtgtgcacctgtagtcccagctgcttgggaggctgaggtaggagaatcgtttgagcctgggaggtggaggttgcagtgggccaagattataccactgtacttgagcctgggtgatggagtaaaaccctgtttcaaaaaaaaagaaaaaaataaaatgaatttgacatcatcaaaattaaatacttttgctctgcaaaatttattgttaagagactgaaaagacaagtcacataccaggggaaagtatttgcaaatcgcgtaacacagggctttttttttttttttttttgacaaagtctcactctgttgtctaggctggagtgcagtggcacaatctcggctcactgcaacctccacctcccaggttcaggcaattctcctgcctcagcctcccgagtagctgggattgcagacctgcaccaccacgcctggttaatttttgtgttttagtagagaaagggtttcaccatgttggccaggctggtcttacactcctgacatcaagtgatctgccagcctcaacctctcaaagtgctgggattacaggcatgagccacagcactgaggcctaacacaggacttgtatgcggaatatataaacaactcccaaaactcaaaaataagaaaataattctataaaaatgcacaaaagatttaaacagacatttcgccacatgtggatggtaaataaacacacaaaaagatgctcaacgtgagtaatcattagggaaatgcaaattaaaatcacaatgcaattcacccattataacagctaaaataaaaaaaataccggcaataccaagtgctgacaagaacacagagcaactggaactttctcaccatgctagtgggaatacaaaatgaaaatgtttccactcaggaaaaaagattgtcagtttctttctttttcttttccttttttttcagacaaggtctctctctgtcaccggggctggagtgcagtggtgcgaccatggctcactgcagcctcgacctccaggctcaaacaatcctcccacctcagcctcctgaatagctgggaccacaggtgcccaccaccatgtctggctaaatttttttctctaactccccacatttgttttttgagggtttttttgtttgttttgttttgctttcatacagacaggggtctcactatgttgccagggctggtctcgaactcctgagctcaagtggtcctcccatcttggcttcccaaagtgcagggattataggcatgagccacggcagccagcctagattggcaatttcttatagagttaaatatatatctacccaaaagacccagcaataccacttctaggtagttaccctctattcacacaaaaacctgtaaacaagtgtttacagaagtattattcataatcacaaaacaatggaaacaacccaaatgtccttcaktgggtgaatggataaactgtggtatatccattcaayggaataccattcagcaataaaaaggtacaaactattggtaaaggcaatagctagtatgaatctcaaaaacattatgctaattgaaagaagaaagtctcgcaaaatattacatcctgtaggattccatttatatgacattctggaaaagacaaaactacagagacagagaacctatcagtggttgccaagggctgggtgttgggcagggcctgactacaaagtggcggtgcaagggaattctttgagtgttggcattgttctctaccccatttgtggtggtcgttacaagaatctatgcatgtgtaaaagtccatagaactatagaaaaaaaaggaaattctaatgtatgtaaatttttaaaaacttaaaaatcagcttgtcaaattttgaagctgacatggtaatattcctttagtaaatgtgtcatggaaaagaagcctatttaaaatgaaaacagacatactgaatgtttattatacagaaccatttgtgttcccctgggtgaagcactctttctgattcttcaatgcagtctaaagaatttagaaaatactacctaataaaaaagaaatagtatgcatagcaattttttaaaattttattttattttaagttttgggatacatgtgcagaatgtgcaggtttgttacatagttaagtgtgtgccatggtggtttgctgcatctatcaacccatcacctaggtattaagccccacgtgcattagctatttatcctgatgctctccctccccctgatgcatagcaatttttaagaacatcaagaaagaaactcacagtaggaaatacgtgtaaatccagaagactggaaaaaaatttgcttgtcaacatgtatcaaataccttggcagaaaaatagttctcatgggccaattctttatgctctgaagcagcagctggtctcttttgttaaaagaagttgttcttggaatacatctagttaatatgcctcttagaatttgccctgcatttttcttatgcaaaggactttatgtaaaaagttggcctgatagaacatgagaatggttgatgatgtgacagttatagttcttgctgcttagcaaaatataatgcatcgtgtgtgtgtgtgcatgtgtgtgtgtgtgtgcatgtgtgtgtgtgtgtgtgtgtagaatctcctgtgcttacttatatatatgaatagataatacattagtatgatttgacattctgtagatgccaaagctgctatttattagtcagaacactcgtgtggggctgtgccagccatttatagctggtacccattttgattgatcagtgccaagggccatatgagttattaaatatgttcaatataagtcctgtaagactatcaactgaaaaaaatctccctttttctaccagctgacctctatattttctgtaatcttcaacacagagacaaaaagsccttttaatattgggttacttgaagttgggtagaggtgtgtattttaattactttaatcgtgtataacaatgtgaaacaggcatatctcatcgcaaatctgtccctgacagtcctccagcctttcttccagggatctctttctttccatttgtgttcccttctccttgcagtcactctgaaagcctgccctctcctgatatttatctgggaccagataaacatcctactgtgggatgagataaactttctcatcccacagtgaccatcccctggaatattattgctgtgacttggggctacaaaaagacacacgacaaatatggcagctcttctgaaaggagcagtttttctttttttcttttcttttcttctttctttctttctttytttttctttctttctttctttcccttcttcttcttcttcttcttcttcttcttctttttcttcttcttcttcttcttcttcttcttcttcttcttcctcttcctcttcctcttcctcttcttcctcttcttcttcttcttcttcttcttcttcttcttcttcttcttcttcttcttcttcttcttcttcttcttcttcttctttcttcttctccttctccttctccttccttcctttctctctttcttttcttttctttcttctctgtcttctttctttttcttttttaaaacagggttttgctctgtctcccagctggagtgcagcagccatggctcactgcagcctcaacctcctgggctcaagtgatcctccttcctcaacctcccgagtagctgrgactacaggcatgcaccatgatgcctgctaatttttgtatttttttgtagagattgttgcagggggggtcttataatgttgcccaggcttgtctccaactcctgggctcaagcatctgcccacctcggcctccaaaagtgagccaccacgcccagtaaaacacttaaaatgtcactttargtcctgtgggaagagcagcgtggaggtgggctgaggttagaaggtgcagagcgtggaagaagattgtgagctgagtattggacatctgttcttgaatagtccctgggcctgccataggaaaggaagttctccagggtaagtgacttggacttttccttttcctctaataacattttttcttgggctgtggccgaaccttaggattcggttcatcccttattcagaccaggttagcttttccctgctctcacctagccatcccacctaggcacagaagaccttgctttcataacagatagctttctccctgaggggggaactctgccagcagttaaaggagtgattcctttccactacattcttgcacagttcccatgaatttgaaggtaaaacaaaaaacatgaaagatactttgagctcattgtgagcaatgttgagtattcactctcctttaccatcagaattcccttgggaatgtttgaaaaacagtgctttagggctttaacaaagttaaacactgatggagggggtttaatgcacttaaaataaaatccaaactcctcttcaggcacagtagtatccggccccttggtacctctctgacctcttccatccagtctctcctttggtccactatgatccagccagtttgagtttcttgcagttcctagaatacttagagctctttccagccccagggcctttgcacttgctgttccctctgcctgggatgctcctctgcatgttctgcccttgactggctcttgctcttctttccctccaatgccatctcctcaatgaagtttttcctgatttctcctcctgatgcactccctacccttgttcgtctttatcccaacatctcctttgcttccttcatagcacttaccataatctaatacttttatgtgtcacattttaatatctgtttcccccactggaccaaaagcttcaggaggatagggaccagtactgttttgtttttcggtgcatcactgggaagtggcacagtgctgggcttttagtaggatctcaatatgtaaatactgaatgaatgattgaattgagtataatgcatgcccctccaagggattcttgaagatgtaaaatctgccttatcgaggaacgaagttatgatagtagaaagatggcatagggttgatattttagatcagggagatctagtgtgatacttccagtttctgccatctgctctgctgacccagaaggctgacagagctctttttacaagaggttaaaaaaaattctgggctgggcactgtggctcacatctataatcccagcactttgggaggctaagatggatggattgcttgaggctaggagttcgagaccagcctgggcaacatggcaaaaccccatctctactaaaaacaaaaaaaatttagctgggtgtggtggtgcatgcctgtaggtccagctacttgggaggctgaggaaggargatcgcttgaacctgggagggggagattgcagtgagccaagatcgcaccactgcattccagcctgggtgatggagcgagactctatcaccaaaaaagaaagaaagaacttctgaagacaaaagattagcttttgaggacccttagtaaggtttgttcaaccagaggcattgcttttgaagacatgggctagtatttattttgtttccaaaattttagatttggagcagtaaaaaatgatcacacacttcacgatatatcagtctttcagggaaggcatagtccttaacacttgttgatgagttttaagttgattctcctttaaacagattttttttcctttaatccacaggttacagttcttatccgcgtgaatacacatggctctgttacgaaaaagtaagatttcaacttttgaaaataatgatttaaaaacatatttgggaggatggttttgaggctggggcttggctcttttcttctttcttggattgtgtttgattttcatggatagttttcccacaggcactttttggcatcatcatttccagatgattcccatggagagttgttcagtattttagtcagaagtggacttatcggctgggcgcactggctcacgcctgtaatcctagcactttgggaggctgaggtgggcgggtcagttgagctcgggagttcgagaccagcctgggtaacatggagagaccccatctctacaaaaaatacaaaaattagccaggcatggtggyggacacctgtagtctcagctactcgggaggctgaggcagggggatcacttgagcctgggaggcagaggctgcagtgagctgagattgcaccactgcatgccagcctgggagacagagtgagaccctgtctcaaacmcmcaaaaaaaaaaaaaaaaaagaagaagaagtggaagtgaacttacagcagggatcatatatttctataaaacttgcaaaaataatgcattttctcgttcggaataaatattcatgttcatagctaatttagcatttgtaatttgtaattttgcgttcttagtcttaaagagtcatctcgaatcttcatacccatcagaacctggatttgcctctgattttagatccagtagtttgtgaatttgaggagaaacatagtaacctaattctgtgaccctcagggtagagttgccagattcagcaaacaaagactcagaacaggacaaccagttaaatttgaacttcagataaacaacaaataattttttagtataagtatgtcccaaatattgcatgagacatacttgcctgggtaatttttgtatttttagtagagatgggttttcaccatgttagccaggctagtcttgaactcctgacctcaagtgatccacccgcctcagcctcccaaagtgctgggattacaggtgtgaggcactgcgcccggccgtggcaggtgaatattaatcgggcctgttgataaactgtagaattttgtccattttctgtccattttctgcttctctgtagttttgttttaaatggagtytagtatctgattgtccctggctgaatctgataatccattaaggcagggaggaactgggtgtcagcaaaatagaatcacagcctcaggatgtagctttggagggcatccacgaagactcttttacaaatgggaagacaaaggcatagaggccaaaaaatagatgcatatgaagtcaatagattaagtctcttgatgcataaaaataataaaaaataatacaggccaggtgcggtggctcatgcctgtattcccagcactttgggaggccgaggcaggtggattgcttgagtccaggagttcgagaccagccttagcaacatggtgaaaccccrtttctactaaaaaatacaaaaaattagccaggtgtggtgatatgtgtctatagtcccagctacttcggaggctgaggtaggagaatcacctgagcctgcaaggttgaggttacagtgagctgagatcacactgctgcactccagccagggcaactgaggtgagaccctgtctcaaaaaagaaaaaaaaagataaaataataataacaatgatgcataaccatttgtaaagtctttaytgggcctgcattgccttggttaactctcaaaacagtagtgcgaggtaatgcttattattacaatcttcattcagcagataagcacaccaagctcagagaggttaagatacccctcggccatacagctaggaggtggtagaaaagagatttgagtctgacttcaaattcacaccctcttcccttctaccaacttttcccaaactttaggtaggtgtgcactacacatgccaacatgccatcttctcaatttttcatcagctgtgttccttctgtcctaaacatttcttaatattttctttaggccaggcacagtggctcatgcctgtaattccagcactttgggagaccaaggtgggaggatcacttgtggtcagaagttcaagatcagcctggccaacatggtgaaaccctgtctctactaaaaatacaaaaattagccaggcatggtggtgggggcctgtaatcccagctactcgggaggctgaggcaggagaatcgcttgaatccaggaggcagaggttgcagtgagccaaggctgtgccattgcactccagcctggacaacaagagtgaaactccatctcaaaaccaattttgttttctttgactaattttaaaaatttataagtgtacttcataatagaaagtttttatccttactgcaaatgaaaacagaatgatttcctatcattaaaaaaaaaaggtagctttaaacacatatacaattaggagaatgtgattcaactctgggtagcttttgttgtgttcctgcacataaaatcagaaagattgactttctcatatgctgattaaatattaatgctatgaacatgaacttcctcagtcatttcatgcacaaccagtgctatatgttccatactcaagaaaacactgttttacaccactctacttctcaacagatctcaagggccaacatcactggaacaaacagagctggaggcttggaggcattgaggtcttctgtttaccagggcaagaatttctttctttcttcctttctttctttctctctttatttttctttctttctttctttctttctttctttctttctttctttctttctttctttctttcttttctttctttctttccttccttccttccttccttccttccttccttccttctttctttctttctttctttctttctttctttctttctttctttctttctttctttctttctctctccctttctttctttctttcttttctttctctctctctctctttctttctttctttctctccttctttcttttttgacagagtctccctttgtcacccagactggagtgcagtggcatgatctcggctcactgcaacctctgcctcccaggtttaagtgattctcttgcctcaacctcctgaatagctgggactacaggcatgcgcaacacctggctaatttttgtatttttagtagagatggggttttgctatgttggccaggctggtctcaaactcctggcctccagtgatccacctgccttggcctcccaaagtgctgggattacaggtgtgagccaccacacccggcctgcacatcatccttgaccaagggttgaattaactgaraagcagctgtgtcataatggctaagaacatgtatttataattactactggctcataagaagaatcacataaattcaacaaaataaaagccacatacggcagacccacagctagtatcatactaaatggggaaaaactgaaagcctttcctcttacatctggaacacgacaaggatggctgcgtttcaccactgttattcaacatagtagtggaagccctagctagagcaatcagacaagcaaaaaaaataaagggcatccaaattggaaaggaagaactcaaattatcctgtttgcagatgatacgtttttgttttgttttgttttggaaggaaggtcttgctctattgcccagtggtgtgatcttggctcactgcaacctccacctcccaggttcaagcaattctcatgcctcagcctcccaaatagctgggattacaggcatgcaccatcacgcccagctaatttttgtataatttagtagagatagggtttcaccatattgcccaggctggccttgaactcctggcctcatgtgatctgcccacctcagcctcccaaagtgctgggattacaggtgtgagccactacaactggccaatataatcttatatttggaaaattctaaagactccagcaaaaaactattagaactgatatacaaattcagtaaagatgcaagacccctgagcaacaatagtgttccaggttaattctttctgtttgtttgtttttgtatttgagacagggtctggctctgtcacccaggctggagtaattttggctcactgcagcctccacctcccaggctcaagccatcctcctatctcagcctccttagtagctgagactacaggtgcatgccaccacgcccagctaatttgtgtgtgtgtgtgtgtgtgtgtgtgtgtgtgtgtgtgtgtgtttgttgttgttgagacagggtcccactctgttgcccaggctggtctcgaaactcctgagctcaggtgatccacctgccttggcctcccaaagtactgggattacaggcatgagctaccacacctggccaggttaattctttattctrtatgctgtctgcttatagaaaggtctcagataccactcctctgtgtcatggaaggcacctactcgcactaccattctaaactttgtcacgtgatttcaggttcataggttcaatgttaatgtgtttccatttctatttcagttaatcaggtgctgctgttccttctgatcgtgaccctctgtgtgattctgtataagaaagttcataaggggactgtgcccaagaatgacgcaggtgagcagacatggaattcattgagttgggatacccaggaatgtggtttgaatatgttcctctaggtcctttcaatagctgggttcagggacaagtgacagtttggtcaactcccaaggacctgctagtagaatatccgccctagaccaccttttcagtcgtgccctaggatggtcggtgctattcaaactttagcatgtgtgagagtcacatggagagcttgttaaaacacagcactgggcccacccgtgaggtgtaggatcagtaggtatggtgtggggcctcaagacttgcatttccgataagctcctggttgaggctgatgctgtaggttcttggaccacagggtgagtgcactgctccacactccatctctttggagcttctcaatgactttgcttatggaaaccaccctctttctcctctccctgctggttcattcccatcagtgcaagtcagcctcataactctcaacttgaaaatggcccttcattggccctgtggtctctcccagctgcactgagaaccatgtttccctcctcgggggtgaattgcctgagatggcaccttcaaaactccaatgcacacacaaagtcaacctccataaaaatcaggaagcactgtttattacatttttaattaatttacttttttttttgagacagaatctcactctgttgccccagctcaaatacagtggcacaatagcagctccctgcagcctcgacctccagggctcaagcaatcctccggcctcagcaccccaggaagttggaactacaggtgtgtgccaccacgcccagctaattttttgtagaaatgggttttgccatgctgctcaggttcatcttgaactcctgggctcaagctgtcctcctaccttggcctcccaaagtgctgggattacaggcatgagctccatgcccagctaatttactttttatataaatcaagcaaatacacacttacgggctggcgatggtggctcatacttgtaatccagcactttgggaggctgaggcgggaggatcacttgagtccaggtgtttgagaccagcccagcctaggcaacaaagcaagaccccatctgcatgcacacaaaaaattacctgggcatggtggggcatgcctatagtcccagctacttgggagctggaatgagaggatcacttgagcctaggaggtctaagcagcagtgagccctgatagtgccactgcactccagcttggatgacagagtgagactctgaatacagttatttggtgtgttacatacatttattccacagttttgttttttttttcagtcagacacttagggactggaaacacaacagtgaacaaaacaayatccctattcccaggaagctggcatttctttctgattatattttgtaatttaaaaattcatttaaaaataattaaaaacatgtataatctgatctaaatgaacatggaatctgcaaagagaatgattttcatacaaagayatatatacaaatgttcttagggtataattcatagtagccccaaactggaaacaattcacatgtacatcaactcgtgagggatacaaaaaatgtaatttatctcacacaatgaaatacttttcgacagtaraaaggaacaaatgactgatacaagctgcaatatggatgaacctgaaaaaaaactatgctaaataaaagaagtcagacctgaaagaccatatattgtatgattccatctatatgaaatttctagaaaaggaaaatctatggagacacagagcagatcagtggttgcctagagctgggagtgggaatggactgactgcagaccaggcagctcaatggaactttctaaaattggatcktggtgatggttgtgcaattctataaatttactaaacatcattgtactgtacgcttacaatgggtaaatttttaaaaatctgtattcgtttgcttgggctgccataacaaaatagcacagactaggtggctagaccatagaaatgtattttctctggttctggaggctggaagtccaggatcaaggtgtgagcaggttttgtttctcctgaggcctctctccttggcatgcagatggccgccttcttgctgtgtcctcacgtggccttttctctgtgctgcattcctggctgtgaccctctgtgtgattctcctcttttcctccttttattaggataccagtcttactgggataaggcctaccaaatggcttcattttaacttatttgcctttttaaaggcaattaagtgcatggacatcctgagatgctggaagctaagacgttaacaaacggactctggaggacacaattcagtccatagcagtatctacacctcaataaactgttctaaaagagagagagagagaaggaagtcacataaagacaaatgtcatctgaactgactccactcttcatgcttcaatccctgctcataaaccaacacattcactcagctaatcccaccacagactcccttcttcaggaaaataagtggataggttttaaaacagctgttaaaacagctccaaagaaatgcacatcctgactgcctaatcagacctatacagagaaacaaagcatttggaccrcatgaatggatccattatcacatgtttatccattcagtgttaaaattttttaaaatcgatgttataaaataccattcaaacgaatgtagcattggcatggaagaatgcttgtggtatgttaaatgggaaaagcaagttgcagaagagactgaaaagtatgattccattttggtttttaaataataagtgtttaaggtatatatatatatatatatatattttttttttttttttttttgagacagagtttcgctcttgttgcccaggctggagtgcaatggtgccatctcggctcaccactacctctgcctstgggttcaagtgattctcctgcctcagcctcccgagtggctgggattacaggcatgcgccaccatgcctggctaattttgtatttttaggagagayggggtttctccatgttggtcargctggtctcaaacgcctgacctcagatgatctgcccaccttagtgtcccaaagtgctgggattacagatgtgagccactgcgcccggcccaggtatatattctttagtattaccattaagaagggtttaaggggcacacaccacactggttgtgttatatattgttataaagcagaggtctacttttggagtgggagtgagaggtctgcagaaaacagtcacaatttaccaaatactcttctgtttgggctgaaattttttcaataattatgtattattttttataatttgaaaaacattaattcaaagaactagtgttctaagttgatgtccagaggccctgtgaagtcctacgttcaagtaaaacatggcggtattctctgtaatatccccattgtgacactccatgtaatctcccgatacttctcttgtgactagtgtgctggtcactcrcagctgtcccacttggggagaggtaagctgatacacttggctaaaacaatccttatttgaaatggaattctgagtcatggcattaggaaagcagacatttcctttcttctaggaataggcgtggcttgatcagagctgcttatggaatggacgaaggcagtatcatttctgttccattctgccagcattgtgatgtttactatttttgttaggcaccaaatagtttcccatagccaacattttaatgctttggctcaggcaccagttggtacaatgaatccaaataatggagcagataattcctaaagaaactgcaaggatggagcattgatgaagaaggtacagttgataagcctttctgccacatttctccagtgtgcatttgtccttcattctgtccagggggaactttttggcagagagcagtatttttggcttaagttagtgctcagtttctctacctggcagaggcccctaaggagtgtggcagtgtcatgtgttggcagcagagctggacactcaatgtttgacctttttctggagtgtcccctcttttatgaggacactttccttttaccttgtgcttcccacagtctgctgaaggcctccgtctgactctggcagccaggcacagccccagcttttttacccttccctcttattcctcaagggccctgttttctgagactcattcatcaattccatttagttcattccagcaaactttcattaagcacttccaaagtgccagactcagtggggataatataatgagcttacagtctagtggaggagacagacacataaatagattcttccaggcattgtggcaagtgctcaaatagagatatctaatattcacccatctattcagatcgtattgaaaatctactatgtgccaggcactgggacagctgcagaggatacagagatgaacaaaatacctgccctcacagagctcctagtgtaataggagaaagaggaaagacatgcaaccaaataaattccaacgcaattaataaattcaaccataggcaaggccacagcatagagaaggtgcgtgttaatttatgtgtagggaggtattaaaggcttcccagaggatctgatgtcagtactgcatttggaatgaatatgtaagggttagccatgcagaaaaggatattgaaatcattccaggcattgggaaggaacatcatgtgcaaaggcactgagataagagtagtgttcagggaaccacgagggctttggtgttgctaaaatagaaggaggtgaggctggagaagtgagcaggggctggatcatgaggggtcttgtgtgccaggcaaagaaatgtggctttaccttttaggaaccaatgaggaactttcagcagcaaagaaacgtcaaattctcattttttggcagatcagttcacagccagcaggtaacatatcacatgatacctccataagattacaacttagtccaaaaggaataatccttaagaaacttttttttttggtttgtttataaaaataattcatggtttgtattagtccgttttcatgctgctgataaagacatacctaagactgaggaaaaaaagaggtttaattggacttacagttccacatggctggggaggcctcagaatcatgtgggaggtgaaaggcacttcttacatggcagcagcaaaagaaaatgagagatacaaaagtgaaaatccttgataaaaccatcagatctcatgagacttattcactaccatgagaacagtatgggagaaaccatccccatgattcacatcatctcccactgggtccctcccacaacatgtgggaaatatgggagtacaattcaagatgagatttgggtggggacacagagccaaaccatatcattctgcccctggtccctccaaatctcatgtcctcacatttcaaaaccaatcmtgccttctcaacagtcccccaaagtcttgactcatttcagcattaactcaaaactccacaatccaaagtcccatctgaaacaaggcaagttccttctgcctatgagcctgtaaaatcaaaagcaagctagttacttcctcttcctagatacagtgggggtacaggtatttggtaaatacagccattccaaatgggagaaattggccaaaacaaaggggttacccctgtgcttgtccaaaatccagcggggcagtcaaattttaaagctccaaaatgatctcctttgactccaggtctcgcatccaggtcatgctgatgcaagacgtgggttcccatggtcttgggcagctctaccctgtggctttgcaggatacagcctccctcccagctgctttcatgggctggcattgagtgtctgtagcttttccagcaacggtgcaagctgtcagtggatctaccattctggggtctggaggatggtggccctcttctcacagctccactaggcagtgccccagtagggactctgcgtgggggctctgaccccacatttcccttctgcactgccctagcagaggtcctccatgaggcccccgcccctgcagcaaacttctgcctgggcatccagacatttccatacatcttctgaaatgtaggtggaggttcccaaaccccaattttttacttctgtgcactcacaggctcaacaccacgtggaagctgccaaggcttggggcttgcaccctctgaagccatggcgcaagccctatgttggcccctttcagccatggctggagtggctgggacacagggcaccacgtccctaggctgcatgcagcacaggaccctgggcccagaccacaaaaccattttctcctaggcctcygggcctgtgatggcaggggcagctgtgaagccctctgatatgccctggagacattttccccattgtcttggggattaatgtttggctccttgttacttatgcaaatttctgcagccagcttgaatttttccttagaaaatgttattttttttttctatcacattgtcaggctgcaaattttctgaactcttatgctctgcttcccttataaaactgaatgcctttaacagcacccaagccacctcttgaatgctttgctgcttagaaatttcttctgccagatatcctaaattatctctctcaagttcaaagttccacaaatccmtagggcagggcaaaatgcccctggtctttttgctaaaacataacaaaagtcacctttgttmcagttcccaacaagttcctcatctacatctgaggccacctcaccctgaaccttattgtccatgtctctaactggcttttggtcaaagccattcaacaagtctmtagraagttccaacctttcctacattttcctgtcttcttctgacccctccaaactcttccaacctctgtttgtcacccagttccaaagttgcttccatatttgttggtatcttttcaacaacgtcccactctactggtaccaatttactgtattagtccgttttcatgctgctgataaagacatacctgagactgggaagaaaaakagttttaatcggacttacagttccacatggctggagaagcctcagaatcatggcaggaggcgraaggcacttcttacatggcagcagcaagagaaagtgagagatgcaaaagcagaaacccctgataaaactaccagatctcatgagacttattcactaccatgagaacagtatggggaaaaccacccccatgattcagattatctcccactgggtccctcccacaacatgtgggaattatgggagtataattcatgatgagattttggtgaggacacagagccataccatatcatggttactttagtcaatttggaaagtataagaaatacaaataaaatcaaaatcactcctaattccataaatagacataggtccatttgcaaatatgtatgtatcaaatwgtgatcaaatactagagagaattttgtattcttttcctccttaacagtgttttatgagcattctctcatgtcagtaaatatattgtgaaaacaaaattattctagtggtggaaatttcagatgcagtagcaagctggtagaaaagacatagaaggagaaagaggaggccattcaatgtgtcttaaattacacaaaatgcagtacctggtagttaatttcaagaaatgcttattgaatgaaatatcagctagaactaccctggacctcagggatagaggttttccaaaaaggatctggaaagagaagggggagggggagagagcaggtggagagagcggggggagagagagagagagagagagagagagagagagagagagctttaagtataaatcagatgagtactttatagtggatactgaatactctgcttatggatcattattcttctccatggctgaaagttgtattgcggtactaaagtatgatgttatggctttggtattttatagcatagccaggctcaaaagaataattaattatttatcttgtgcattagtcatgttctttcatttacctccttcctcttgctgtcaacgtttgagaaacttgactagaatggggataggagagggaaaatcacaaccagtatcttatagcagtgtaggcaaagtaaatattctgattcagggaagagttgaggactgttggacaaatgaggcttttcagttctttgtatgttttttaagtgtgtgtgtgttttaggctagccaactggctcctgtaagatagytccaaaataatagattktgtgwtatgatcaaaagggctcacagccttatgtgctagaatccaacactatgaccccagattttgagaaaagcaaagctttttcttgtaaatcgtctaacaaggacacaggagcccagctcaaatctgtctccctgtgctggctttaaggcagtaattttattagaaaaggctcaggggtggattctgggattagtaggtgattgatggaagaggagaggaggtctaaaaggtcctgaggcatgcacagttatctcttcatgccacctcatgggtctcatgtgcaaatctgggaggagttagtttgaaatacagggtggaaatccaagctgtgacatcagcaagcttgttctgcacaaacttcagttgaccagattggttccaactgatttcagccagtttcttttatttatttatttatctatttattatactttaagttttagggtacatgtgcacaatgtgcaggtttgttacatatgtatacacgtgccatgttggtgtgctgtacacattaactcgtcatttacatcaggtatatctcctaatgctatcccttccccctccccccaccccacacctggtrtgtgatgttccccttcctgtgtccaagtgttctcattgttcaattcccacctatgaatgagaacatgcagtgtttggttttttatccctgcgatagtttgctgagaatgatggtttccagcttcatccatgtccctacaaaggacatgaactcatccttttttatggctgcatagtgttccatggtgtatatgtgccacattttcttaatccagtctatcattgatggacatttgggttggttccaagtctttgctattgtgattagtgctgcagtaaacatacgtgtgcatgtgtctttaaagcagcatgatttataatcctctgggtatatacccagtaatgggatggctgggtcaaatggtatttctagttctagatccttgaggaatcaccacactgtcttccacaatggttgaaccagtttacagttccaccaacagtgtaaaagtgttcctatttctccacatcctctccaggacctgttgtttcctgaccttttaatgatcaccattctaactggtgtgagatggtatctcattgtggttttgatttgcatttctctgatggccagtgatggtgagcattttttcatgtgtctgttggttgcataaatgtcttcttttgagaagtgtctgttcatatccttctcccacttgttgatggggttgtttgtttttttcttgtaaatttgtttgagttctttgtcgattctggctattagccctttgtcagatgagtagattgcaaaaattttctcccattctgtaggttgcctgttcactctgatggtagtttcttttgccgtgcagaagctctttagtttaattagatcccatttgtcaattttggcttttgttgccattgcttttagtgtattagacatgaagtccttgcccatgcctatgtcctgaatggtattgcctaggttttcttctagggtttttatggttttaggtctaacatttcagtctttaatacatcttgaattaatttttgtataaggtgtaaggaaggggtccagttttagctttctacatatggctagccagttttcccatcaccatttattaaatagggagtcctttccctgtttcttgtttttgtcaggtttgtcaaagatcagatggttgtagatgtgtggtgttatttctggggcctctgttctgttccattggtctatatctctgttttggtaccagtaccatgctattttgrttactgtagccttgtagtatagtttgaagtcaggtagcgtgatgcctccagctttgttcttttggcttaggattgacttggcgatgcgggctcttttttggttccatatgaactttaaagtatttttttccaattctgtgaagaaagtcattggtagcttgatggggatggcattgaatctataaattaccttgggcagtgtggccattttcacgatattgattcttcctatccatgagcatggaatgttcttccatttgtttgtgtcctcttttatttcgatgaggcagtggtttgtagttctccttgaagagatccttcacatctctcgtaagttggattcctaggtattttattctctttgaagcaattgtgaatgggagttcactcatgatttggctctctgtttgtctgttattggtgtataagaatgcttgtgatttttgcacattgattttatatcctgagactttgctgaagttgcttatcagcttgaggagattatgggctgagacggtcgggttttctaaatatacaatcatgtcatctgcaaacagggacagtttgacttcctcttttcctaaatgaataccctttatttctttctcctgcctgattgccctggccagaacttccaacactgtgttgaataggagtggtgagagagggcatccctgtcttgtgccagttttcaaagggaatgctttcagcttttgcccattcagtatgatattggctgtgggtttgtcataaataggtcttattattttgagatacgtcccatcaatgcctaatttattgagaatttttagcatgaagggctgtcgaattttgtcaaaggccttttctgcttctattgatataatcatggggtttttgtctttggttctatttatatgctggattacatttattgatttgtgtatgttgaaccagccttgcatcccagggatgaagcgcacttgattatggtgaataagctttttgatgtgctgctggattcagtttgccagtatttttttgaggatttttgcatcagtgttcatcagggatataatctcagaagcagaaagagtttcatcatttcagcattttattcttmtaatctatcatcctgcaaactcgagaatttctattagtcattggtttctttaactctttgggggtatggtttcaatagcgacataaacaaaatagaagtttatttcctctctcaagtataagtctgatgtatcagttccacaattatccagatcaagattccttctatattatggttttggtgacctcaacaagtagcttccatcttgtggtmtaagctggcaactctaactcccaccatcatatcaacagtccagctaatgggaaaggggaaaggcaagggggtgagtgagcattcctttgaagggtagacccagcagtggcacacattacttaaaccaacatcccattggtcagaacttgatcatatagagctgcacgggagttggtaaaatagtctttgtggttggctatgtacmagctaaaattccaaagttcttttctaagggaagacagaatgactagatattggagaacaatcagcagtctcttccacactatgccatcttcccccaggagtatggaagatgcattaaactggctctactgtgaaattctttcatgttccaagacaccagtttttatgtttccagatgatgaatccgagactcctgaagaactggaagaagagattcctgtggtgatttgtgctgcagcagggaggatgggtgccactatggctgccatcaatagcatctacagcaacactgacgccaacatcttgttctatgtagtgggactccggaatactctgactcgaatacggtaagttatgtcttacagactttggcactttctgtttccttcccctctctccttccctccctccctccctccctacctcttcttcttcttttctttctttcttgccttctctccctttctctctttctctccctctctctttctgtctctctctctctctctgtctttctctctttctctctttctttctgataggatcttgctctgttgctcagactggattgtgcggtggcgcaatcacagctcactgcagccttgacctccctggctcaagcaatccttctgtttccacctcccaagtagctgagactacaagtgcatgctaccacacccagctcattttctaatttttttgtggagagcgagtctctctttgttgcttaggtttgtcttgaaatcctgggttcaagcaatcctccctcctcagcctcccaaaatgctgggattacaggtgtgagccaccacacctggcctctactttcttatatttccttaaatagatttcctttctttttggattaagaaaaaataaacagaaaattaaaatttgaacatattataaaaatgaaagataattgtaaaatcttggtttggagagtgtctctctgagcccagaaatcatccagaaaaatggacagatttgactgcatcacatttaaaaactttacaatgatgaaaaatacaagtgaagctattcatacaatagattaggaccaagtatttttaacatgtattatagacaaaaaattaccatccaaaatatagaattgttacaaaaattttaaaaacatggttaaaaaatgggcataggatataaccagataattcacagaggaaaaaaatacaaatggccaataaacatgaaaaggtgttgtaggctgggtgaggtggctcactcctatatttccaacactttgggaagccaaggaaaaaggatgacttgggatcaggctcgagaccagcctgggcaacataacaagacctctgtctctactaaaaattttagaaattagctgagggtggtgatacatagcgggaggctgaggtgggaggatcccttgagcccaggagtttgaggctgctgtaagctatgatcgcatcacttaactccagcctgggcaacagagtgagaccttgtttcagctaaaaataaataaataaggctgggcgcagtggctaactcctgtaatcctacctgaagtcaagaatttgagaccagcctggtcaatatggcgaaaccccgtctctactaaagatacaaaaatttgctgagcatgttagcacattcctgtaatcctagctactggggaggctgaggccagagaatggcttaaacccaggaggtggaggttgcagtgagctgagatcgtgccactgcgcttcagcctgggtgacagagtgagactgcatctccaaaaataaaaaataataaataaaaaataaataaataaagtttttctgtgttattaataggaaaatgtgaattgaaacatttttgcattgttgaaaatgaaaataaaaatgaaaacatatatgtcacttcagtgacaatcttcactcatcaggttggcaaaaattaaacagaacaacattacccagtgcaggaaaatgggcatgcttattccttatttatacaatgtgcattttctaagttggtaagacatttggcaaggtcaacatggcaatatctatcaaaaggttgtatgcatatataatttgattcacatgccttttcctcttccaggaatctgtgctacaaaaattctagtacatattaccaaaatacgtgtacaacaatgctagtttcagcattatgtgaattagtgaaaacatttcaaagtgctgaaatgtccaccaatggaagaatatttaaatgaactgtgaaatatgatccagatgttaacgaaagaaggcactctgtctaagcagacataggagattcccaaggcatattgttaagtggaaaaaactagctgcagtataactcgtatagtatgatctactttaggaaattcaaaacccctaactgtaagtgtgtacatgtacatgtatgtgtttctgtgaagaaaaagaactggaaagctatcagattgttaacactatctcttgggaggacagaggaatcagggagggtgctgatgaaaggaagttcagggtgtttcagtattatttgatcattcaaaaggagaatatatttgcatactgcttttataattaaatgtttttgtagtggtgccatcaggaggtactgagatctgtaaaggtgtttgcctataatctaaatggcccttggctgccctgggttttgatgtcttgtgtatgctttctggattttctgtctcatttctcactctccttatcatactattgctcatcattcacttagcctgttgttaacagcccattaactatccatgggtatgaaaactagataaccaaatccaaaaggatggcatgtataaggtttctgggcaagggtttgtccttaacaaaaggcrtgaacctcatgactttctgactttggccaggggctatttcccagttcttgctgtccagtctactccctgcccccttttacatactttaaagttttttttttcattgaagtagaatcccaaaacagaaaattgtataaatccagtgtgcagtttactggatcatcacaaagtaaacacactcatgtaacatccagcatgttctcactaacacttagtataaaatcaatctttttaagtttgccattttgattagtgtccagtggtatctaraaatttgaagtttcattatttctaatgtcattgaacacttttcccacacactttgtaaccatttggaagtaagtgttcaagtctcttgcctattttgctgttagtctatctttttttaattgatatgaccaattattttttcagattttgcagatctaaattttgttcacatttaattcttktgttgatttttagtcaacaacaaatactaccctaggtggctttagtcattcgacattttattttgagattatttctaccaagaacctcattatgaattggatacaagataaaaattctgcaagaccaagaaaacagaaggggagagggagggggaagagaagaaggggaacgaagacagatggggaagatcaagggaccaaatcaaagagacaaaggtaaattcaaatcagccttggagtcaaaacagcagagtaaaaatgacttcgatcaaagctgaaggttcagaatgtcctgtttcataatatttcagagctgttaccacgtggcgaagatagtaccagcaaccacagatgctgctatataagaaagaatacttttcattcttcctgtttcctggggaaattatttggatctggggagagatttggttattactattttgcttcatttcctttgcagaaagagttacgtgattgaggggaaaaaaagatttaaagtcagaccagatggggagaaaagtcagagggatttattggactaaactctactaaatttacgcacattttaattttaactttctagggaggcaacagattgaccttggggcaataggcaaatggaggaaagaattgaagggtatactagaggtttttttggtcatctttttagaaaatggattgaacattccaaactgagagaaataaactttaaaatcgtggaattcaacccgatggtcctcaaagggaagatcagaccagactcatcgaggcctgaattgctccagcctgtaagtagggaccacacaggtgctggggacagtccttggtgagacctttgttcagtaaaggagtgctagtcaccgggatgcatgtggaatattatttttgaagccatgtggagttgatctccaccaaactccgcttatgtataatttataagccagctgctacagaaaggatttaagatggtttatagaagcacaatgaagttattaaagaagaagtgaagcattaaaaaaatgtagaatgcatttatgggtgtgaatatgtctgtgggggtgggagctggaggagggccaggtagctgaggccaggaaaaagagtcccaaacccaccagctgttgggatatttaactgtgattgtacgttaaagctgcctcggagtgtccgacagctaagaaaaaacagtagtatgatggattatatacttcatagtattgactaagataatatattcaggagacaccatctcttttcctagcattggaaatcttaaggtattttactgcaagagttcttacaaaagggaccctctcctgcataaaaagtggtgtttttggctggacgtgctggctcgtgcttgtaatcccagcactttgggaggctgagcggggaggattgcttgagctcagaagtttgagaccagcttgggcaacatattgagaccctgtttatacttaaaaaarttttatttagtggccaagcgtggttgctcatgcctgtaatcccaacactttgggaggccgaggcaggcrgatcgtgaggtcaggagttcgagaccagcctggccaacatagtgaaaccccatctctactaaaaatacaaaaattagctgggcatggtggcaggcacctgtagccccggctactcgggagtctgaggcaggataatcgcttgaacccgggaggtggaggttgcagtgagccaagattgcactattgcactccagcctaggcaacagagtgagactccgtctcaaaaaaaaaawtttttttttaattagctaggcatggtggcatacccctgtagtcctagctacctactcaggaggctgaggtgggaggattgtttgagtctgggagttcgaggctgtagtgagctgtgatcatgccactgcactccagcctgggcaacagagagagaccctgtctcaaaaaagaaaaaaaaaraaaagagtggtgtttttgatagcagttctacagaaactgcagccaccttctacatatgattgttacttaaattcatccctgaaaatttacttaattctgagccctctgtctgtgatatgatcttcccccaattccagatgttgtcagagtacaagccatgacttcggaggaagcaatgttgtcagtaatgaaacttcgaagttcctacccacaggtcatgctgctcctttttctggttcaaggagctaaaaggttgagcttgctgttggaatgacacacgtgtgtgtgtgtgtgtgtgtgtgtgtgtgtgtgtgtgtgtgtatttaaggctgatttaattgacaattatcaaaattactgaatacagagaaaggcaggcgatttgtgccctaaaagtgactaacgagcctctgtgactcccactacagcagttcgcagagatgaaagtggcaacagcctcggcactagggggtttgtatctaggagaacggccgatccgtcagcgctggcttcagccccaggcctcagataagttgggcamtgggaagctcagatgagacatcttgctagctcctgttttattccgctccaaacctggagctgagctgaggccatggtcaaagccgactctccagtacccccagaagacactaagccatatgcctctcccccaccatcatttcttttgtcgttttaacagctgaactttgttcgattttatctccctctacttatccaccaacacgagaaagtcatctatttggacgatgatgtaattgtacaaggtactctcgctaactgccaaraacacttggaaaagaagcagctgataagtagaataactgtctctcttcatttttcaaataactaattgtgcagcaagttttgactgcttatttaagttgtgagtacagtattgttgtaaatgtggaagtattttggaaacgggttgatacttactgagayaatccanttgacactctgattgtcaaaaccagcaataaatagcttggtagcctttcctttccctgtrtgcctataatgtacggaaataaagtgtcacggatgacattcttaggagtgagctaagttttggtgtttaaatgttgtgttctatctcttccactacaaacaggatacgcattggtgtggtatctacttagcaacagaaataaagaaattagatcagtgccagtttgaactcatcatccagtggctttctaaatctgtaggcaagactcttaataaataaatagtcaagccacttgaaatcagggatccaatactcttctcccatagcaaaatcaagagctgtttaagctctaaggctctatctagcccaaaaacaaatgctataatgttttacttggtggtgtttctaaattcaggtgatatccaagaactgtatgacaccaccttggccctgggccacgcggcggctttctcagatgactgcgatttgccctctgctcaggacataaacagactygtgggacttcaggtgggcatatgctgtctcagaaatcctcccttcactctacaactctggccccttctcccccctctgcaagtcaaaatgagtgtaacctccacctcaaaaaccttatgggccagtctggactgcagggaggtggaacagtacaggggtctgggactttggttcatatcttagcwccatgccttaccaactctggggcaactttctttagccctgcaaggtcccaccttccttacctgaaacatgggaacaatcatgtctactttgttgtgtctttgtgagcagtaatgaaataacatggtgtccaagtgtccagcatgaaataaaagctccagaaatgatcattgttacctaggttgctcatcaccatgctctctgtcagagatgatgttttctgtaaaagagacttgctgaaccattggttctattttcagagttttgaccatcacttttatcccccttccagtagaagaaaatattgattttgttaagggtaaagatctccttaccctgatggaactgaggaaagttgaacctacatgcaatgctgaaaccgaaggggtagctttgaaatatgaggtgttattaagagttaaatgctgtttttcaaaaaagcttctagcaaataattttatgtatgtggcattttaaggcacttcaaggcataggctctgggaccagattcaattttgtcaaaatctgggcactatcacttggtagttttatgacctcgggcaagttacttagccagttgtttctacctcatttgccaaacagaggtaataatagtacttcctttgtagttatcgtgagaattaaattagttaacacatataaagctattacatgagagtaatgaggtagtacatgtaaagttcttagaaaagggcctggtgtatagaaagtactcaagtatttccatgactcctgtgtgaggtttgagagcatcacattaaggaattatagatgataacagtctatatgggtgaaagaatgtgtatgtcctgccctgtacaacattcattcaacaatgacttattgagtgcttactctgtgcctgacactgttttaggtactagtaatatagtgagcaaaacgaaaactcctgcttttgtgtatttcacattctagtgggaacagacagacagtaaacaagtaaaatatttaacagaggattggggtggaggcagggctgtattttaaatacagtaatcagggaaggctccactgagattgtgctgtttgaacctaaacttgaaagaattgagggaaccacctgtgcagatggttagaggggaaaccctccaggaagcgggaagaacaagtgtaaagatcttgaggcaggggtgagtctggttcattaaaggtggtcgctgttgctgagggatcaagaggagaataacaggagttggaaaggtattggagggtcagatgatatagggtatggcaggccattttaggaaatctggctgtttctgtgaatgagatgggaagctattggaggagcttagaggagatgagtgacctagagacagagtggggtggaaaatagtggaagcaaggatactggttaggaggaacttgcagaaatccattgagtggcaattatggcctgaacaggaaggtagcagtgtggtagtagtggcaagagaagtggttggcttccagcattttgaagatgggacctacaccatttgctgaaatatttggatgagaagagagtgagaaaaaaggagtcaaggaggacctaatgaccccaggttttttgcccaagtaactagaaggatagagttgccactgactgaggtggggcaggtgcagggaagcaggtttgggataggattgggatcaattttgggatgtaagttggagctgcctttactaagcatctgaaaggagacatttggatggcagatgtagcaggagttggaagtccagaggagaggtcagggctgtcagatgggtggtatttagagccatgagactggacaaggctgtttatggagttattgctagagaaaggcactagtgctgcactcagacttagggcattcagcatttagaggttggagaaatgagggaaaccagcaaaacaaaacaaaawcaacaaactacccagtggccagtgacacaggaggaaacccaaagatactgcacaagggtttcaagaaaatgatcattttccagaaacaaaagattcgctggtcaaaagcatgcacatcctnttcccttacagaacacatatatgggctatctggactaccggaagaaggccatcaaggaccttggcatcagccccagcacctgctctttcaatcctggtgtgattgttgccaacatgacagaatggaagcaccagcgcatcaccaagcaattggagaaatggatgcaaaagaatgtggagtacgtgaaggcttctctaccattttttccatgcttggaaacaaaatcattcaattaattttccacacatagttcaagggttagaaatatttcacagtcatctcaggtcagattttcttacagaggcaatgttaagaaagaaaagggggcagtcaattaaaacctttcctcaaaagatataaatcagaggaatcaagatcctgtggagcgaggagtccctgattatacattttcctagtaagctgttgaaaaatgtgacttgaatcttttccaccaaacaatcttcatttatcttagttgagtttcccctcctaacatagatttttttattaaggattattatataaagtcaattttgctttttaaggtttatttttataatttataatttttcgttatcggagttttaaaatagagaagataaaaataagtctaatacaagcactattatcccatcattgtattgcctagcagtcttgtgtatctggatattttaataccatcataaccttgaatttgcargtaaagttattctaaataatgtaggattcgaatttgatctcctgtgtctactatttaaaaccctgggagttaaaatggcaaaatattaacactgttactctaggtgatgtatataggagttcatggtattcttactattttgtgtatgtttgacaattttcaaaatgaaaatttgggggagaatgaaaggccataagtcttagtacatagtgagataatgtcttacatcatttacaatatcagattcgactttatctgagtttgtgggggctccaggccaaatgttgtttttctatttcatttcttagggaaaacctctatagcagctccctgggaggaggggtggccacctccccaatgctgattgtgtttcatgggaaatattccacaattaaccccctgtggcacataaggcacctgggtaagtatttcagaaaaactgtttagaaaaacgcaaatgtccattttatttttgtatttttgagacagagtctcgctctgctgcccaggctggagtgcaatggcgtgatctcggctcactggaacctccgcttcctgggttcaagcaattcacctgcctcagcatctcgagtagctgggattacaggcatgtgccatcacgcccagctaatttctgtatttttagtacagatggggtttcaccatgttggccaggctggtctcaaactcctgaccttaggtgatccacccatttcggcctcccaaagtgcyaggattacggcataagccaccatgcccggccgcaaatgtgcattttatagacccagtgagcaccatagcgaggagagggtgctacatacagcaccaggttgttcaattgaaatcctccaggtgaccttggacaaatgacttgaccctcagtgctcagattcagcaagtgcagctgatattctgagctacctgaggagcgtgtttctggagatttatggaaagccatcaaattcatgcttagcatatagtatgtgcttagtaaacatgaactattataaagagaactttcggccgggcgtggtggctcacgcttgtaatcccagcactttgggaggctgaggagggtggataacctgaggttaggagttcaagaccaacctgaccaacgtggtgaaacccgtctctgctaaaaatataaaaattcgctgggcatgggggcaggcacctgcaatcccagctactcgggaggctgaggcaggagaatcgcttggacctggaaggcagaggttgcagtgagctacgattgcgccactgcactccagcctgggcgacaggaccgaaactctatctcaaaaaaaaaaaaaaaaaagagagagagagagagagaactttcactgtcaaaacttcaaaaccttattgaactgtcaagccacacttttattttctcttgcagtaacttacagtggacaaaaccaaataaattagcataatggcttaggatgaattcagaaagctgccattaaaatttatcctttaaaaagcagttgactctgtactctgtgagttctctaagtcttttactcactacacaagtgtagggtttagagtatgaactggaatcccaactatgatttkgggcaggttacggaatacatgtaaattgcttagcatagagcctagcatagaggacacattcacatccactctaacacatggccacaatccctgatccaaaaccgctgggccagacatgtttggaagtttagaaagggtttggattttaaaaaggtaatgtggtgctgagtgggatctaggttttactgccaaagaagttattaaaaaaccttttgttttcagacctttggggattatcttagaattgtaggcaatggatatgcacttatatttaccaagtgtccattacattgccaagaactggactaggttctgttaaggaaggtgaatattatttctaattctcacaacaaccctgcaaggtgttatgtcccataatcttttttttttttttttttttttaaaggacgtaattgtggaggctgagttcctgtatgctctcgatgattctgtgggttgcttctgcatcattcccagaatcctctgattttcctgagcatgtatatgcacaaaagagtgccacagggaagttagtgttgtgtctgatttgatttayagtcatgttgggttcaacattaggtcaaatatcaacctttccatgtgcagatcccatcaaagtagaaggtctatttttaaatatgtgtaggaacagttatgcagagcttagatcaatawggttayggcattttatgatcttgagacagactcagaattacattttatgaaacatgcaacttaggccaggcatgatggctcatgcctataatcccagtactttgggaggttgaagcgggtggatcacttgaggtcaggagttcaagaccagcctggccaacatggtgaaaccccatctctactaaaaatatgaaaaattagctgggcatggtggcacacacctgtaatcccagttattcgggaggctgatgcaggagaatagcctaaacctgggaggcagagattgaactgagcagaaatcatgccactgcactccagtctgggtgacagagctagactccatctcaaaagaaaaaaaagagaaatatccactttactgacaagtaggaagggacatactcttcccaaaggaaagatgtcgtttttctttgtaggacagagcttccatctgtgctgaaggttttggaatcagggatggtgtgcaaagtaaatctacacaaaaatcatttgaaaaatgaggtttcaggatgttctggaggcagaagggcaacataacactaatgggcattaagtttgggtctaaacaggcaggcttaagattttttaaatttacaaaatatatttagctaaaagcaatttcatcacccaaaytgcaagcccctctgaggtagttctgcatagcccttcagttacgaagctgagaggtgaggatgtcctacttagtagagacttttcatgggaaggtgcctcttcccaaatgaatatttcctttgcatagactctgatgattgataattattccagttatgctgcgatagtttcaaacaactagtttctcttctgcagctgccgtcacagctatgtttattagtaacagaagccaggttgtgttgttgttaacgtcatacaatagaataacataaccctagcaaatcaaccctctcgtaattcaatggactttcagctgtttaaagaatatatatatcaaattccttttcatggaaagaaagtygaacactatagagatttttaaaaaattgtacattcacrccaccttaatgtagttctagaataggtattctaaagagtattctaagcaatggcactgttagggtaaatgcatagtctctcgaagtcatgacttatgaggggagtaatgttcaggtggagatagatagctgtktgtttaaaaagtagatcttagtcacattttatatttagacaagastgttcaaaagcaaatgttgccatttttcattaaggaggtgaaatgcagagaaaaaagaacccctataaactcttgggtgggagggaaattaatagaacttcttgggggacaatgcggcaatctctatcaaaattgaaaaggcacacaaccttcwatmtagcaattccaccyacaatattttatcytacakatatatatatatatatatatatatatatatatatatatatatatatatatatatttgtacacatacactagacatacatagagggctgctcattgctgtgtttatgctaataataggatagaaacaatctaaatgtccttaataaggaacttggtcaataaatagtatcattctatacagtcactaaaaataatttggtaaatccacatgtactgctgtggaaagtttcccaagacagtaattttaaaaggcaatgtccacataaagaaacaaaataatttttttttaaaggcaaggtagcagtatgctctattttgtcttctgtctttaaatatacatatacatgcatacaggtcaaacaatgctataacactactagaaggattcacaagagactaacagtggttgatttggagacctggggtgggtagaaaattcactgtataacctttttatttgtttacctttttttaaactatgaacttgtattcaatttataatacaaaaatgttattctctaacaagcctattattttttctctatacacaatgaaggctggaatccagatgccagatattcggagcattttctgcaggaagctaaattactccactggaatggaagacataaaccttgggacttccctagtgttcacaacgacttatgggaaagctggtttgttcctgaccctgcagggatatttaaactcaatcaccatagctgatataactctacccttaaaatattccctgtatagaaatgtggaattgtccctttgtagccaactataacattgttctttatgaatattacctttgatacatatgatccacaatataaaaaccaaaaactactgtgtgcaaattataccttggaccatataggcattgattaacttctttaagtacatgtgataactatggaaatcaagattatgtgactgaaaaacataaaggaagagacccatctagataacagcaatcaacctgcttaattctgaatgacaattatatccacaaatttttaaaacttctacatgtatttttcacatgaagatctccttaacaggttgccaaccttttcttttataaaactattacatttaaaatatggacgtctgaaaaataaaatattcatcatttttatgatttttatcatgttactattctacatgttaaatataatagaaggtaaactgacctcaggtttaaaggggaaagaataccactcagtcttgctatagaaaaagcccgtaagttaaggataacaattcttaatatcttttattgtaaaagccatcagactttcaaatgaattttaaaatctttcaatattatttaatgaaaaagtctcacactgtcatgtataggatatatcaacatttactactcatctgtcatgttaggaaaaacatcattattacacgcttggaaaatcctcaaacccatctctagtggatgtccgtcataatttaaagggtattttccccattcaaataaaacaatctcttgtaaagctacaatagttatataccaaagcaatacctagttacatgctttacacagtcccgtgaaaaaataatttaattgctcctaatccctgatgcaaggcacttcaaagcacccgcacaaaacgtccatgtaaacagcagtacagtacatcatttaaataacataaatgacttttacacagcttgacctaggaaaaaataaaatccatcatagccacagctaaaaagcatgttaagattcacaataagaatttgtttctcttattataaagagaagagcaatcatataacctcctgggggtgggggagacctcataaatattttatattgattgacaaaacagcatgctccctgggtacgtatgaaatcagaatattcaggagtaactgagaggatgcaaataacatttcttagtacccagctttaatatctaccagacctggtagtctggattatttgtagcaccatggaaaactcattagaaaatcacaaaggtatacacctcaacctttccatgaggttcatttaatttatagtaacaaacagcaatgatgcagataaagaatctttaaaattattggcttactggatttacctagcaagaaaaattctatattacttattttagtacatctcatgtacataaagcaccagtttaaatgagagtatcaaatatctccagcatctttttgcttagcctagaagttcatttcttatcactttccatggcacactcttaaagccaaggaagataaaactagaatggttataaatatgaatggagaaattcagttccttccctatcatatttacatgtctcaagtaaaacacagatgagtggcaaaaggtctactgcattctctggaacctgccaccccagagtagttaaytggctactagaggattaacacacagggctgagcaggtcaaagccagggctctgtcaggtaagggccagtttttactactgagcaactcacaaacaccactggtaaagcaaagaggtctgagtgtgcatatagctcagggaaccctgagtttacccttagttaccactaaaaactaacaaatgagactccactgaggcttaacttcatatacaaaaatcaacacctttgcctctttgacagtggtaattattagcatgcccttcttaggtataaaagggataatggtatatctaggtttatgcacagttaagaatcaactataaatattcagacttgtattttaaaattacagattaaaagtgactcccaaaagaaaatcaatttcttcataaatgaaatatagtatataaaaagctggaatgataattaattcaaatacaaaagctagtatacaaaaaccctactttttcttccaaactacttaggttcatacggttcacactaccacacaactgttctacattacaattacaccactagagtaaaatactaataaaacacttcagttagcaaactgaggttctacttgttgacaactgcattaaaactgcagcatttaagcagagctgagaagcaccattcttaagcatggctttcttcttcctgttcttgtgttccacagtgattactaaaggaaggaatttggtctgtaaatgactgggtcatccactgcccattaggaatgccactgaaagctgattctcctcttaactccacgctctcaactgccagaaaagaaaaacaaagttagtttatgccatttagaaatatttgctttttttaaagtagagactgggtcttactctatcgcccaggctggaatgcagtggcatgatcacagctctttgcagcctcaaactcctgggcttgagtgatcctcccatcctagcctctcaaagcactgggattacaggtgtgagccaccgtatcagcttatttgaagtttttttttttctttttgagacggtgtctcattctgtcacccaggctggagtccagtggtgtgatttcggctcactacagcctctgcctcccgggatcgaggagaggcatatatattatatataatgatactcctgcctcagcctcccaagtagctaggattatacctgccaccatgctaatttttgtatattttagtagagatggggtttcaccatgttggccaggctggtctcgaactcctgacctcaaatgatccacccacctcagcctctcaaactgctgggattacaggcgtgaaccaccatgcccggcctggaagttttaaatgatcaaagtaggagattttaacagtctagtgaaggagaattattattaaaatagttaagcaagcttccggaatacaactgttaagtttctgttcttcagatacaggactcatttgttattaaaggaggaaaatgcaactaggatggcctagagttcatgacttaaagaaaatgcactgtaggccgggtgcggtggctcatgcctgtaatcccagcacttttggaggccaaggtgggcagatcacgaggtcaggagatcgagaccaacctggctaacacggtgaaaccctgtctctattaaaaatacaaaaaaaattagccaggcatcgtggcggatgcctgtagtcccagctactcgggaggctgaggcaggagaatggtgtgaacccaggagggggagcttgcagtgagccaagatcgagccactgcactctagcctgggtgacacagcgagaatctgtctcaaaaacaaacaaacaaaaaagaaaatgtactgtaaaagtctgtgtaattcaacgtgaaataaccatcaatttttcactattagtcactaaataaaatttcatattatcattcccattcttcaataatttactctccttctattaaaattttccccccaatcctgaccaaaccgtctttgaaaggaatacacatgtggagggaaccatacttagcccatttgaagagaagccacaaggttcactgctgcatggattttctccgtaagcaccaccatatgctgcctcataacctggatcatatttttcttccttaacagccatcttctttgcatcctctgtgaggaaggtaaaaaggatttaaatctgattttgtacaacaattttaaaagtagctttattcagaaatcatgaacaattctttttcttgaatattcatatacactgagatacatctctattaatcttttaaacttatagcatgtactaaataaacacataagaactgtaaaaaccgcttacattcaactttacgtagggtacaatatttcttacatccctctgctctggcactctgcaggtgaattatctgcagaagtgccagagtagagggaagaccttggtaaaaggagattttaacagtgactaatattcattatcagagcactctggctgcgaatataattgttttcttttttcctgcttttaaatccataagatactttctgtaatgtgtgtgtgtgtgtgtgtgtgtgtgtgtgtgtgtgtgtgtgtatgtgtctatatatagacacacacatatgtatacgcacacaagtgtatacacacatatatgtatatagacatacatacttatgtgtatatatgtatatatacacatgtatatatacacgtgtgcatatatgtgcacacatatgtatatgtgtatatgtatatatgtatatgtgtatatatatgtaagtatatatgtgtatatatacacacacaaaatgaataaaaggaatgaggacagtaacataccttgggcaagctgtaggtcaaatgtatattgcacctcttgaacgtccatatttcgttcaatgcctttcaactgatctcttaagtccttcagttttatgtagtaatgaactttgtcttgggctcgaggaaactgagcacatcttgcactggatgatggcataacatagcagagctagaatcacaacattttataatttcagaaatcttataattctattgaattcactcattgagattagaatatttgtctttatttgggttaataacttgatacttaactacatataaatatatgtaaaaatcaataaaagtagttgcttttaaggttgaatttgtaatactgacttattaccaagtcaggaagtgaaaaataatgagcctccgcctaatgagctgcctcctgggttcaagcgattcttctgcctcagcctcctacgtagctgggattacagcgcatgccaccatgcctggctaatttttgtattttttagtggagatggggtttcaccatgttggccaggctggtctcgaactcctaacctcaggtgatccgcctgcctcggcctcccaaagtgctgggattataggcatgagccaccacgcccggcctccaaatggcatgtaacagagaatgacacagtactctacaggaatttctctacaattcactacaggtagtgaatttgtaccattttaaccaagcagacaaaggtgggcctttatttaagcaaaaaccaatgctataataaaactcatcaattgcatatttataagaaattatgaacaaaaacaattttaaaggagaaatttaaatatatttaggtggcagaaacatttttaggtttccacaaaaacctggcagcaaattagcttctccatcagttaagatgttgtatatacaacatgtaaatctgtgcactgtgttgttctttaaaagttgtaaataaaacctaaaactaagaagcaaaattggaaccaaatgcctgcagaagctctgtagagaggacaatttgaaaaacactgttatttcatgatgactttgtgtataagacaacagtattgaatgccagttaggttggctggaggcttgtctgggttgtattatttatatggctctaaaatgaagttgagctaagatatataaatggggcaactggttttcctaatcaggatcatgtctgtgtttccatgtttgtttcacaacagtacgagggctaaaccatttgaatttgacaactacatgccattaaatgtattctgaatgtagtatatgagccagttcctctcaatattttcactgaataacaacatcaagacatttagctgacaaatgtttttctttctaataaaccctaatagtatttgaattaatttacaactattagttaaagctgatgtataggtattattcaacaaaatacagtgtaattgttttgcatggtataaatcacaatggataggacaaataaggaaattatctagaaaaaaattcacatttagctgatttacaaattcaattttagggacttacagtttctgtgtctggaatcttatggggctgaagcccaaattccaagttcttaacctttactccaaaaacttctttactaaaaatttcataaatacctaaaatgaaatacaaacatatttacattgcccataatgttagcaaagaaaaaaaaaatttaaaagtaaatcttacattttccattaaacactgctattcgtggctgatatttctgtaatttctgtactagaatacgtcctccttcacgaaattctttactaaaattgaattaaaaagtagtcaaaaatataaatatgacaatatttataatatgctaaattcagacagctttcaatgaaagagcatattgtacatttgttgagctcagcttgaactagatacatatgatgttcctagaatatttgg

SEQ ID NO: 94993 - DNA, 132368 bp, Homo sapiens
  misc_feature (1)...(132368): n = A,T,C or G
ctgttcatctggtgatctatgcaaaggaaggtatcatttttctcgtttttccagaagagaaaactgtaattgacttcactcctgtctcaaaaagatgaagtaatgtttctagagttacatgttatatggagttgggttcacccatactctaggatttttcttactcataaccccaagagtccctgaaaaatcttaaacaaaactagtatatccatgagatcctatggggaaacggcctgtgtagcagagtcggaaagagagatgatggcacaagggtaaatgaaaaagtttaacagaaagacagagatgttggtgaggttaacaaaaatgatgctgcacccggagactaggaacaagggagagctgttaccacctctgggccttattaaagggcaagagaagggagttgttactggacttcagcaagaggtgtatctgcgggagagaagcctcctgacaacagccctagccttaggacaaggagtagagctacaggcaaagcaatagggcctaggcagggatggagcagggataaaaatatcccaacctatatcccctcctactttgccaactcctgctggtgtctcccactggccaaacccaagaagaagccagaaggacacacaactcttgtgatgaaatccataaagataagcctgcctcctgagacagagagaagagcagagaagggtggagagtgcaagtggaggggaaaggaagaataagaaacaactttcagtgaagcagagaaaaccatccccatttgtccatttastcaacaaatacctatcttaccaggggcagggaagacaagacaagacaagtaaggtccctagcttcagggaggttaccatgtagtaggggataattgacaataatcatataaccaaacaaagatacagcattttcagatagtggtaaatgccaggaaggaacaacaggattaatggactgattgtagcagatggagagctgctttaaagagggtggtcaggaaaagcttcttggaggaggtggcacttgagttaaggcaatctgggcttcttagaaaaatctcccttgattccacatctactatcagggtttttctacgtggtttgtgggtaagaatccaatttgggctgtgatctagatgcatctgaccagtccccaggaaaatgagataaaggactggaagataagaatagcaacaacagcaggggataacatttacatatagcttgtaatctctgccatcaagccttttcttaactcctttgcatggcttcacctagctcctgtgtatatcaaggaactgggctgttacttctgtgtttaaacatccccagcactgcaagaacggtgaagtggaaaggcacgttctattgctctttcttaagacatctcagtcttactcctttgaagttctttgcaaaccacagaatagtttcttctctcttccttggtgggtcctgcctgatgtgaactcgagatagattcttcttgatgcatctcctcctactctcaatttaaaatgttaaaataactgtgtcagagaggtgaaacctgtgcaccaatagctttctcccagcctctgatgatgtgtgccattcaacagctctgcagctcgcggcaggtctgttttttctttctctcccgcactccccgctcctcctcgtcgatttcgggcgtgtcttcagtcttaactcggtggtctccaagcctttgttgaataggtaagatttctcagtcaataaagtcaacgcagttttctacctcagcattcttcccctcctctttctctcaaaaaagaaagaaagaagaaaaaaaggaaaaaagaaagaagacagaagaaaaaaaggaaaaaagaagaaagaaagaaaagaaagaaagaaaaagaaagaaagaaagagaaagaagaaagaaagaaagaaagaaagaaagaaagagaaagaaaggaaggaagaaagaaagaaagaaagaaagaaagaaagaaagaaagaaagaaagaaagaaaagaaaaatgggtgggggctaagacgggggagaggctactattgctagcctctggggtctacattttgtatttcgctgacagcccagggccgctccaaagcccgccgcgcagccaatgggcagcggtgatttatggagctgactaacgcgcgctgaatgcggcctgtcagagctctgtgaatggcttcccttcgccgcacaagccccggctttgtgttgctaagcgattagagcagatgtaatgagattttgcccaatcctcgctttgccctttcctagcttaggcaaaattgtgtgtgtttttgtgaatttttcgagtttgccttcgcattgtggcaaacaacgactaactttgcctcgagtttaacgagactggatatttcccattcagaagtgagtaaagaacacctgtcctcacaggagaaggaaaaaaaaatccccctttgtgggggctgaaacattatcctaatgttatattcatagccataaatgacttgctacactttctttgcataccttatctggaatcttgcaaaggagctaaattaaaggaaagagaaatggagagtgggggtggagcccatctctggtcctccaaatgagaagataaaaataaaagcaggcatcacaaaagcattacttctctcaagtaagctctaaattggcccactgctggcagaaagtccgattatttatggcgatgaggaatttactgattttttttccttaattacgctcatctctttgaaagggactgaagcctcaatgtgcattctatagagggtcatttagcaaaatgacatcagacgctgtggcgtgctccgcgcatcgtggctttaaaaaatgattattctgtgccactaaatggtatagatgtaccaacacagactagatttttaactctggaagacgtgctggctacccgttctttgttgggttttgtaagatgcattttgcgctcggctttccgcttggctggagacacgcaaactgaatctgcaagtaatgcaggcggcgagcgaggagccggcgagaggccgagtaggattctaatcacgtccttgctaactgacaagaagcaagccagccaaaaacccaccaatttctttttgaatcttggtaattgggtacttttacacgcagctcacgctattcggatagagtcacaagcttagatagaccagtgtctcaaagcgaccacacatttctaatgcgtttttttaattaaaatctcaatccgtttggaatgaattcatatcatatatgcctcttacttaaaatcaatatagcaagtaggtgtattggagaaaatgagtagaaaatgtatgcctggaagtgagggaagagaaacatactcaccactaggagcttgtatgtggagagggatgcctctccaacccccatcccagaaccaccatcctccccacccagacctagtctccattatttcatccagccccaccatagtttcacagggagaaactcagaatggagttgagaattggaaaatggtggaggaccctctctttctggttcacttttttgggggattttaaattttgatcaaaggataatgcagccatctattctttttggtgggcatgtacatttgcagcataggatagaaagaaaacatatatacatgtacatacacacacacacacacacacacacaaacacacactcattcatcataaagaaaccatttggatgggactggccatagcacttatcattgtcatttctgccacttagcatgttttgcaacattttcttctccatccacctcttccctttgacattttcataaaactggaccaggggcatcagagtcaaagaaagcttagagtcagctgattattttcattttaaaaaaaggaaaaagttttattacgaaactagtttgtataaaacagggttatacatatttttgtaagtttgtaataaaacagtaagaaaaaaaaaggcagtaatagaaatctccaaaaggcaacctatcaaaaccaactggctgccactttgagtttggacagtagctgcataaactttgttcttcttgaacagtatttaataacatcattaatacattaacaacatttctataaagtaagacacattggtgctgaagtacaactggtggcctcttgatctcacctatgaggagagttctttacaaaaccacatagggaaaattgcagttgtaaggtgaactacacatctaaaatatgcagaggtaatagcattacatgttaaagtatcaagatatacacattttaaaccatttgtacaaaacttctataaatttttctctctctttctctcttatgtacaaaaatatcttaatatatccccgaactggttaggatagatacaaatagattttttataataaaaaattcacaaaagattggaagcattctataatgaaaatggtagaaaagacagtgtgagggaagccatggggtttgggaatcgggccctggaggagaagcagagtttcaaagggctgagaatagcatagtttcactgtaaaccaatgtctacagcttattggggtgggggctactgagacgaaagacaccaactcgtttctagagggctaagaactgcactttaagaaagggcggggaggtgaagggacccgagcaagaactttcagctgtgcgtgttagaggtgatgggagttactataacgcgtgtgctgctcccttctgccaggagcccactgcttttgcacacaagctgcattttgcgcattgactcaggtcccagttgctcttcatatctccgtgaatgattggagtgcaaagatactgttctgagcgcttcccgttttctgaaagccatgtctctcaggcatgcctcgcttagttggcgatggggttggttgactgttttcgtttttttcttcttctcttttcttcttcttcttctttttttttcttttccttttctccccctcccaacgccactgacaagaaagcactaaagatgcaggttgtgcgatcaccctataacataaggaaaagaacaggagaggttaatttgaacgtgtaggctagtggtagagggagatggaggtctggggaaagagtctgtcaggtagacatctcttttaacatgtcccagtattcggttcaccagtatctctgcacctcactactacccttcactccttggagacctgggcaaggccattttcagaggccagtgctgaaactaacaaactaggacttgaaatcgaccaactttcacaaattctttaaataaaaatccccttatctccttggagacatccccacttccacagacactcagagggaggacgaaggcaagaatacccccctgcccaccccaaaatgcaacctacctgcttccaaagtccattcgcaccagggcctgaccaggccgagcccctcagaaccagttggtgaagtcgagaagctcctgctcctcggggctgagcgggtcgtaagagccctcgtccgacgagtaggatgasaccggcgagccggccatggagttcaagtcgttggagtagttgggggagatggtgggcgacaggacgcctgcctggaaggcggcgctcaccgcgtcatgctcgtccagcagctgctgcagcgcgcggatgtactcgaccgccgagcgcagtgtcyccaccttactcatcttcttgttggccgcgccgttggggacgtgctcccgaagggtggcaaagcccaggttgaccaacttgacgcggttgcgctcgcgctcgttgcggcgcgccacggcggccggctgctgctgcggcaggctgtagccaaagccgctgaagttgagccggcgtttgcagcgcatcagttcgggcgaagacgagcgctgtcgcttgacttgcttgggcgctgacttgtgaccgccccctgagggctggccgtcggccgccggtctcagctgcggcgcctgctgctgctgctgctgctgctgctgctgctgctgcgcgctctgcgctgccgctgcggcggctgcggccgccgcggctgcggccgtggcaaagaaacaggctgcgggcggcaggaagggctgctggggctgcggctggggctgctggccggcgccgccgctctccatcttggcagagctttccatgcgcagcggcggccaaggagtcgcggaatcagagcgatccgggacgcgaggtgcggggcccgcgagggggacacagagagaacttgggtgcaggaacagagagggaaaraaaaggaaatatgaagcgggagccctgacggaagttaaaaaatatatacaaaatccccgggagacttcttagagtgggagcaaaaaangtgaaaatgctttttctcctccctgcacgccgcctcctcctccctcccctcctcccttcgcgggttggcttcgggagcctcgcgtggcgctcgcgtgtgaggctgccgctggcgccttcttgtttctaaraaaaaaaaaagcagaagcagcagcaaaagtcagtgctgaacgcgctctgccgcgtctcgcgttcctctcctactaaggctgcgctctcttgcgccgggtctcggtctctccagccgtggctcaggctgtttttattattttgttaactcccttcctttctgatttccttctttcactcgccctccctggccggatccctgtcggtgcgccttccacgttccctggccagaagtgagagagtgctgggctgccggagtgcgtccgccttttcaatgggacacccagccccacgcgcagccctggccccgcctcgccccccactccccgctgctgcagcgagcggctgcagcccccactcccccccctcctcttacctcttcctcccacccactccctaaactccccctcctcctctcctctccccccctcccgttcctttctcccgctccttgcaaactctccattcagctgggtttgttgttgcagtgcgtgcgcctggcgcgtgccggactcccggctgaataaacaggcggcgcgctcggggcgggctgctgccgggggtggctttaggaagggggtggggggcgtcacaggagggacaaatggctctaggaattgaggtgtataggtggaaagacttggggtgaagctctcttggattctactaagaacttgaagcaaagcgcagggaagggtttgggcagaaaaaatggcacaggaacggtgtggaggtgaggagggagtggggctcgacttttcctgttttctctctctcctcactgttattctcttcgggttcctcggtgaccctagaaattggagcaaattacgattgaagtttagaaacatggttgggggagggactccgtccagaacagtgaaaaaaagtgctggactatgtgaaaacgtgggttctagtcccaaggcgtcctctcaatgctctgtggctcctcgaagtggcatcctctctgagccttcgcttcctcgtctgcagccacagaatatggtctctaatgtcccattcagctctaaaaactaggatgtgctccccataactgagcaagtgtgtggggggccgcggggaagcgacaccgaggagtggttgtgagccgtcctgtaggtgggtgtatatggcagggacgtccccctaggatgacctctggccccctgtaccatcgccccctaccgccaccccctccccataaagattatttccggaccagcttagsggatatcataaagaagggagtgctctgggatactcccagaccctcggagaagaaagatgcggggcgggggttgagtgatggcgcttagggcactggtggggattcctggttcttcggcgccgccgcgggcacctcggcggccttggcgcagccaccatcccgccccaggcgtgtgcccggcggcccggtggcaggcgactgggagcggagcccggcggggccgcgtgctggcgccgagagggagggggaggcgcttgcagccgtcgctcgaccgcttggacagcgcctgcccaggcgtccttcctgggccttcggccctggcgctctctggccagaaccccgtccagcttcaggacgtctggggacgcggcgctgcggagaaagcagaccaagcaataggccccatctctttaaggatctggtccggagagaggctggggcatgtctcaggtcttgtctacataggcagaacgaagtggagggcaatcatccatttgattttccagtagaaataatccgagatctgggtgcaggaatgattgtggtgaattatccggataattggttctaattgaactcccctttgtggaggtggatctttctaaagggccaaggggatgacccagggagctgctcttggtatgtgggctggctgagtgtttctggaacaatagtgatgatggtgggcagtaatgacgggcggctcccgaagtgaatcacctctcttctctacctcagtttcatctttgcagaataggtaggcttcagaggtataggaccaaatcgtgccaacagaggtcaattctgtaacctttcccagccacacagccccttctccccatggtaacctgtggcttgatggcctcacaggactggctgaaccccgtgggattcacacctcaggcctttctccacatccctgaccaaggaaagggcctaagaggtctctggaagtataggaggtgagcacccaaaagcagagtcacaacacagcctgggcaccctgcacctcccagccagagtaagcctcagaccacttgcagaaataggaattattcaggcactccttacccacctcccacatgacccagctgtgtcctaatgccccattcactctatttcagccaaatagttgagtgttgggggtgggagggagtgtcgcaaatgtggaagcatctagatgtgttttcttttacattaagctgaaacatgagccccaaactccctactaacttggactcacttcacaaaggtcccgagtctgagctctaccacaatggtgccttataaccttgaacaagtccctctgcctctactggcctcagttttctgatctacacacaagggatgtacagtagctaattttgaaacttgtatctaacagcttagaaaatttgctggtagccagcacgtgtttccttttccaggatgcatacacagagatctcaataccagggaagtagaggacagaacctcctctcctcctyccccctacacacaccatgaaatgggtgcccaaatggagtggaagtgcattgtagtgaagaagccttgtcttgtagtggccttactcattggcctcaggccaggaggaaggacagtcgttgctgggatccttctggccaaaaccgccagaacatttgtctctattctccctatgccagccctgagcctgacctcactcttctcaccctagtatgctaagttttcttccttacatgctttgcaaagccttccaagaaccgaggcgttctcctccccccactcaagtaaacctggagtttgcacctcaacactgtcatctccactttctcctccaaccctagggtagaacagtctataatttttctttagaggtttgcatttctatccttggggattctaccaagagagttttccattgatattggctttctggttgttttcaccagtgtgaagcaaaagatgggaggctcaggagccaaaattagaatcctgcctctgactgtgtgacctagattataatccctcctcccgacctgagagaactggccacatgttctgctctcctaggcccatggaattccagataaagcaggctgatttgacttggtatctaggcccctttacctgagagctgtgtgaccctgagacactctaggggtctctatttcacctatgccagtaattatagtatctacctccaagagttgtgagacttcaatgatatgtatgtagagcactctagcccaggtctaaagagaaagggattaataagaaagtcatgctcacacaacccacccaggaaagggtgtgtggcaggaggagcctcagcacttggcttcctggaaccactctgtgatcatcactccagccartggagatccagtgccactctgtctcactgtcccagcacctaggggtgagtcattcctgtcatttttgagaaatggtggtgatactggcatattaagatgatggagatagtaacccgatttttagacatgaaaagtagcaagtaagatagacwatagagatgttctgtggcctccacatgcaaggggcttcagcagagccactgggccctgctttcttggctcccttgccacacagtgggcctgattctgagcaagtccttagggctttagttggctaagacacttgaacaatgtcccatttatcttcacatgaagggagaagtaaacaactcacaaaaggaaggtttgataccttcattcataaatgaggtggtagtactccctttgcctgtatgtcaagggtgttatgagaattaaatcagatgttgttgggtaatttgctttgcaagtctctccacatatcagagattgccttttcactttttccgaatagcagcattcagtgttctgtcttgtcatgagggtgggggagtgggaaggacaaagcactgatcccctttggtgagtatcacccagagtacagacattgcagaaagatragaaggcttctctttctcctccaatacaataagggacttaatttctgcaccttcagacccctttcctatatcagaacactctggagctgaaccatacttcagattagactttatcttcattcagcatcaggatctgtagggggagatggctttcctagtggccaaaggggtctgctgccctgagatcagagaccctgtgccctgagtctcctgccaccttaatttccattcacagctgaaggccaggccagtaccacctttgctgaagctcaagacctatgtatgttctcttgattgtgtgttgtctctctgtaaaaagaagatatgactcatctctttgaaaaccaatttatgctttctctttggggagagggattgatattaaaagtgaaactaggattttcattggacaaataatttaataaagttatatttttaactttagttagattctgaatcaggggcaaagggaatacaaagatgaacacaagtcttggattctggattttgttacaggattttaagtgtaatcctcaatttgggggtgacttgagttccagaagcaatggatgctttgagaaaagtgagtgtgcttggcattcatagccaatattcatcttccaggagctataattaatacagggcctctgtcctgctggggtgtctgctgttctaaggctgtgctagacactgtcctacccagggaaaatgaaaaggactttactgcacaatctactgcctctaagaataccctacccaaggtaatttcagaaaggattgctgcccagcctgcattgactctgcaccagccttggagggcctgctcagggggcagaatagcacaaaccatgtatttggcttggctcagcttcctggtcacagcagccaggcttgcacctgcattaaggaattcagccttctaacaaatctattcactttttcaatatgctttaaaaagaaaaaagtttgaaaaaacaaaacaaaaaaagcacaaactatattttattgtggcttttgggataaggagggaatgtggggtggggtgaggaggtaatttgcagccaccctcacaagtccttttgaagttctccaaataaggagaagtaacgctaagtctttatttttttctaaagccccatttacattatgattaaataccttccttggatgagcataaagaaagtcgttaatctatatagctctccaaagaatcaatacattctaaacttttgtaggatttgttacactctattttgttacagtaggccagctcctctctgtctaggcacatggctttccttccctcctcctccccacctcctccaagaatgaaaataaagtaaaggtctttcatggtaaacaaaaccagctgattcttcacagagaacccctgaatagctggagaagaaaaaaaaaacttmcaataaatggtgcatttttttctctgctgggtgtagtattcaaggatcagggcagtattcaaacagaggtccattttttgctcagcaagagagtttagaaaagaagcgtggagtccattcagagctctccccccttcacaatcgaagggctctatgaaacctatcttccatgccttgtcagagtgtttctggggaccaattagtgctttgttgtacggcttctttgctgaatctttgagccgcaagaaaaagcgctcttgagtctccccttattttgaccatttcagtcattactcagtgtaataattaatatgacaactggacgctggagtttgtatagaaacacctcagctacaggagcaagtgtgcagtgggtggtaacgagccgcacatcagccggagaagccacacacacaaaaaaagcaatgaatggcaagagagaaagagaaggaataaagataaaatagttggcacaacgcaggggaacataaaacagactcaaatgagaagaaggagggggaaggggggacaatttaaaggggagggggaaaaatgccctacagaggttaacttattttgaaactgttttctgaatagaaccgtggacgtgagtgaccggatttcagcccatcaaatctcccacccccactttgtggatcctcttggaactcgggggtggggaagagggctccagcaaactttaggttctccccagggttcttctggaaggtgtacccaacatgctactcagcccaattcccaaccctttgcaccaggtttggcttctgtttttatttttgcaaagtctgttcctcttggctccaacttccgtctttggagttgttaatggagaagttagggtgctatgtagattcaccaggcgagttcagtactactaccctggggatgaatgttggtgagaagccattccagatagacccccaacaactctgcttcgttgaccctcagaacagtaccctgtgggactcctgagccgtaaggagtctccctggtagcgcgcagcggggccaggckctgtgctccggcccccgtgcggtgcccagctctgcaggttcccgaaagtgcgccccggggtggggttgcaatccgccccgtgacggcataataaataattagagggtttaagcgtgttagccacagctcatgctaatgagccagataagggctcacgctaacccgaagtgacagtttgcatataggagggaagaagaaaaaatcctgcttccccccccacgcacaaacttgattgctccttctcaaattcatgtccccaaatcccttcccccattcctcggacttccctcttctcacatgcccccacttcagccacaacacacacactatccgtttttgacccttcctttgcctttcaccgggtcagacggcattgtgacgtcacaaaacccctgggtgcctatatctgacctgcgcggaaagttcattctgagtgcgtcctggcgagtctcagcccccaagcgggtggaacgcaccaagggtctcatccgcgaggaagggctttaacgctcagggtcaggaacctctgagagctcttggggacttgcgcgcccttggatgctcttgcgttcaacagggctaggagactaccggctggggcgaggaatgcaggcgcctagagccttggagctcctgaaacgttcctgmcgcctccggaaagcaagggcagtttaccgaagtgactgaggtcagtcgtgtgtccccattgtgtggccacgtgtcctgtgtccatcaccaccttcccaaagtccaagctcagcccgactccttgcggtgcggcctgggaatgctctggcctataaatcagcttcgtggctggagctgtctccaccaccgtggcaaacctggacgctggccccgagggcaaagggaaagtgtactcctaacagattcaggaggaagcagccgcagcctgagcgcrgcatctgccagggaaactgtgcgccccaggtcagctagttaactatttcatccctccccaccactcttccctaggccaagtatttgcagcacgggcagggaccagtaactgattttcaggccttttgagaggaagaggaagagagaggaagagaaggatttctaatagtagatattcactctcatggactctttaggaaacagcaacaaagacaagattaagtaagttgatatttttaaaatgctgacaacagtgcacatagtaaacactggatatgtgttaaataagtacaaacagacagaaatagataacaggaggtatatgctaatcatctaagatgttagaaaatactgttcagatctaaaaatgatcaaggctgacatgctcattgattcatcaaataactatgaaacctaatcagaggggaataagacacaatgagtgccttcaatacatttgtgacttagtagacattaaagcagatgtataagaaagtccattaaaacatgcggtgggggcaaccatggagaatcttcttccccatggtcccttctctttggactcccaccttcctgcatctcccaccccaaataaatacacaatctaggtaaaagtggtggacttgttatgcaaacacatcctaatgtcatccagcccctcttccccaaccagatggtcacccctaagcttctcctatataacaattcatgagcagacactaatgatttcaacatacacacaccctttgacacgttactgttaggtgcaatgaaaaggcaagtcacttaaagagacagatcccagaaaatcctgaaactttctacctctgtgacctctggcaagttgctcatcgtctctcaggctctataaaatgagaggrttgagtaagatgcctcccctctgattctgactaaatagagaatacaggcgtggaccacatgatcctctagtggcaaccattcctctctttgaatagacgaacttggtttgctgttcttctcccactgccctcctgccataagaaccttcattaggcaaatgatgtcatcagtgagaccagtccttgctggtgccaggattatggctcttggtagccagaaggcaatgtcattgggtcagcatgactttagccctggggactagggcaagagatcggccattggcacctcaggatgcacatgcaaacggatgaaactcaccattgtcgccgacagcattgcttgggaaataggattctcctctactcctgggcagttttgggtctaggaattgggaccccgagaagctgtaatttctgcgagttgtgtgggtcgttcgccacctgccggttatttcgcaaactgcagctgggactgcgaacatttgcaacttgattcattcaggactactwgattctattccattaattcttctccatacaatttggttcaaccatagagcatcgtgaggacttaatgacgttctcccctgatactcccattagagataactgagatgtttgttaatattcagattctgaagctttatcccagacccaccaaatcagaatctggcaaattggctcttttagcaagctacctggaagtccttttgtatactaaagataaagaactatttctctagaggtattctgggtgataagacagtctccattactcagactcatgaagaactaatatattctgataaagaagttaaactagccatgtaaatatgttaatactttatttgggtaagaggatgccctagtgacttgagggggaggagaggctcagtaagttattacaaagatggcctttgatactggccctgaagaatggtcagaaacttgcagcgggaagaaaagatccacaggaacaacctacccagccccggagcctttcgcttccttgactttctccactccagtagccttaacctccattcctcttcagccaccccttgcaagtctgcatcttgggctttgtctttacccaaaagagccccactttggaaatctkaactttccattcccayatgtagcctcatcctctgattcttcctcatcctcayttctgccctacctctctccaacctcctttcctgagctctatttcttccaatctggtctccccccaactcaggaaagtttgattgattaactcataaacctgtaacttataaaatgcgtaccttcccatcctaaaaaaaaggctgatacactctytgaccttgtgaccaccttyagccctctgacaaattttttgaacattagtcaacacccacagtttcatttatttcttgctcttccctctggagtacccagagtgtgtctgtgggaatctttctggatgaggggggctgagtaaagattgtgggtagggctcatccaatctgttgagggactgaggatgagtgagggagaacttactctctctasctgtcttggagctggggcactagtcttctcctaactttggactcagactcatactggaactgtagtctgggtccacagtttgtcaactgcagatcttgggactcagcctccataaccacacgarctaatttcttgaaatacatgtccatctacatctaatttcttactggttcttttttctggagaacccagactaatacagtcaccccgactctattttgctacacataaaagataaatcaggtcctactttatttgatcatctcaatgcatctggccctgctgatcactcatctcttcttgagattctctcctcctttgactaccatggttcttatccttctgatcctttgtttctcagtacttagtttttttagtttctcatccccagtgtcaagttccttgatgacatatgctgcccttagagtttagcttccacctcttctgctgatgactctcaaattcttggttctggactgacctccctgggatctgaaactggtgtgaccaacattgctactggaatattccatggatgtatcaagggcaacatatttgaaactgagatcatgcttattccctcaactcgttccctccttttgtgttctatatttcagggtttagcaccatstgcccacacagtcaaaccaaaatcctggggtcatgccatactctcaccactctctcacaggcactccacaaccaccaagtcttaacaattatacacacacacagacacacacacacatatacacacacaaacacacacatttagtatgtatataatataaacaaatgtacataatgaaaaatccatctgaatttaaatcattttcttcctccctattactatatcattgctttacttcagtattgtcccagctggtattcatgcttttagtttaatctccctcaaatactttttcttcactgccaccagaatgatctaactaaatgtcacagtcacacgtataaaaggcatcagaacataaaaaaatggaactttatattacagccccagacaaagagatctttacaaagtatcacataccctattgctcctctacaaaacctttcagaacaggggaacaggatggctgaatagaagccttcacctatcattctccccacaggaacaccaaattgtgtgactatccacacaaaaaagcatcttcataagaaccaaaaatcaggtaagccatcacagtacgctattttagttttatatcactgaaagggacacctaagaaggtagaaaagacagtcttgaattgctgatgcaactcctcccccatcaccccaacactccagcagcagtggacgcatggcatggacagagaatctgtgtgcttcggtaagggacagcaaagggattgtgggacttggcattgtcctgccctgccatagtggaaagcaacaccaggcagaactcagtcagcacccacagagggagcatttagaccaggcctagccagaggagaaytgcccatcctagtgttcaaaagtttagttcttgcaagtctcaccaacatgggctaaacagctcttgggtactaaagaaactcaaaaggcagtctaggccacaaagactgcaattcccaggcaagtcctgacgctatgctgggctcagagccagtggacttgcggggcacatgacctagtgaatccccagcaagggttgccaagggagtgcttgtctcacccctcttccaacctctggcagcacagctcacagctccaggagagactccttccctctgtttgaggaaaggagagggaggaataaagagggctttgtcttgcaacttgaatatcagctcagctacagtagaatagggtgctgggcagagtcctgaggtccctattccaggctctagcttccagacaacatttctagacacatcctgggacagaagagaccccactaccttgaagtgaaggacccagtcatggaaagaacctttgggccctgaatgatcagcaacagtaaccaggtagtatattccatgggccttggcttcaggtgtgacccagcatattcctagctgtggtggctatgaggagagactccttctgcttgagaaacagagggggaagaataaaggggacttagtcttggagcttgggtatgaggttggccgcagtggggtaaaatagcaggcaggctcttgggttcccaattccaggccttggctcttggatggcatttctggactgccctgggccagagggggcccactcctctgaagagagagtcccagaccttgcagcattcacaacaagctgcccgaagagcccctagcccttgagtgaagatcagtgatagcctggcagtactccctgtgggtctggggcagtggtagccagggtgagagacccctctgtttgtggaaaggggagggaagaatgggaagaactctgtcttgtggcttgggtgccagctcagccacagtaaaagagagcaccaggtagtttcctaaggtttccaactccaggctctggcacctggatgttgaagagttaggtgtttaataccctacttgcagtatgggcttccatctctggaccagcctaaggctggggagaatgtgtcaccctggctggctttgccacctactgattgtagagccctagggccttgagtgaacataggcagtagccaggcagtagttgccacaggtcttgggctacatccagtgctgtgctggcttcagatctgacccagtgaagtcctagtggtggtgaccacaggggtgcttgtgtcactgctctgctcccccagctycagacagctcarcacagagtgagagactctattcatctgggaggaagtaaggattaaaaacaagagtctctgcctggtaatccagataattcttctggaccttatccaacaccaccaaggtggtacctctgtaagcttgcaagagccacagtattacttggtttggagtttcccctgttgcaaatgcagccgcagtgatcaaaaacttggattacaatatccaaatttattagaatacctggaaatcctttccaaaaagtactactacaaacaagcccagatggtgagaactatataaaacactaactcttcaatgcccagacaccaatgaactagatggtcaagtatcaagatcatctagaaaaacacgacctcaccaaatgaactaaataagacaccaggaaccaatgctgcagagacagagatatgtgacctttcagacagggaattcagaatacctgctttgaggaaaatcaacataattcaagataacatagagaaggaattcagaattctattggatgaatttatcaaaatttaaaayaattaaaaagaattgagcagaaattctgaagctgaaaagtgcaatagacatactgaagaatgtattacagtcataagataattgacgaagcagaagaaagaattagtgagcttgaagacaggctatttgaaaatacacaaaggagacagaagagtaaaaaagaatgaagcatgcctacaagatctagaaaataaccttaaaagagcagacctaagagttgttgaccttaaagagaaggtagagagagagatgggggtagaaagtttttcaaaggcataataacagaacttgctgaacctaaaraacaatatcaatgttcaagtacaagaagattatagaacattaagcagatttaacccaartaggactacctgaagacatttaataatcaaaaaaggtcaaggataaaggaaggaggctaaaagcagcaagagaaaagaaacaaaaaacgtgcaacggatctccaatacatctgacagtagacgtttcagtggaaaccttataggcatggaggaagtagcatgacatatttaaagtgctgaagggaaaaaactattttttctttccaacttttattttaggttcagggactatacctacaggtttgttacatgggtgaattttatatcacaggggtttggtgtaccgattattttgtcacccatgtagkgaacatagtatctgataggtaatttttcaatcctcacccttctcccaccctccaacctcaagaaggactcagtatctattgttctgttttttgtgtctatcttcactcagtgtttatttggttttctattcttgcatgaattcacttaggataatggcctccagctctatccatgttgctgcaaatgacatgatttcattcatttttatgatataatattccatggtgtatatgtcgtacattttccttatccagtctaccattgatgggcatctagtttgattacatgtctttgctattgctaataatgctgcagcaaacttgtccacgtgggtatctttatggtagaatgatttatattcctttgggtatataatataatgctgggtcgaatggtagttctgttttaagtcctttgagagatctccaaacagctttccacagtggctaaactaatttactttcccaccagcagtgtatgaacatatccttttctccacaacctcaccaacatctgctacatttttattttttcatgatcgccattctgattagtgtgagatggtatctcattgtggttttgatttgcatttctctaatgattagtgatgttgagcattttttcatatgcttgttgggtgtgtgtatgtcttctcttgagaagtgtctgttcatgtcctttgctcatttttaatgtggttgtttgtgttttgtttattagtttaagttcctcacagaatctgaatattagacctttgttggatgcgtagtttgcaaatattttctcccattttgtgggtcttcttttttctctattgatactttattttgctgtgctgaagctctttagtttaattaagtcccacttgtcaatttttctttttgttaacaattgcttttggtgttttcttcatgaaatttttgtagcgctgatgtccagaatggtatttcataggttttcttctagggttcttaaagttagttttaggtttttaaagttttaggtcttttaatcatcttgagttgacttttgtatatggtgaaaggaaggagtacagtttcaatcttcagcatatggctagtcctctatcccagcaccatttattgagtaggtattcccttcccaattgcttatgattgtcagctttgttgaaaatcaggtaattatagatgtgcaactttatttctgaattctctaacctgttccattggtctatgtgtctgtttttgtaacagtaccatgctgttttggttactttagccttgtggtatggtttgaagttgggtagtgtgatgcctctgactttgttctttttgcttaggattgttttgaatacctaggttcytttttggtttcatwtgaattttagaatggtatcttcttattctgtgaaaaaaaatgtcattggtagtttcatagaaatagcaatgaatctgttgtgggtagtatggccattttaccaatgttaattcttcctacccatgagcatggaatgtttttccatttgcttgtgttgtgtctgatttctttcagcagtgttttgtaattctcattgtagagatctttcacctccctggttagctgtatgcccaggtattttattatttttgtggctattgtgaatgtgattgtgttcttaatttgactcccagcttggatgttattgtgtacagaaatgctactaatttttatacattgatttttttattctgaaacttttatgaagttgtttatcagatctagacgccttagagcagacacaatggggttttcttggtataggatcataacatctatgaagagagatagtttgacttcctctcctatttggatgtcttttatttctttctcttgcctgattactctggctaggacttctagtacgatgttgaataggagtggtgagagtaggcatccttgtcttgttccagttctcaagcttccagtttttgctattcagtataatgttggctgtggattcatcatagatggctcttattattttgaggtgtgttcctttgatgcctagtttgttgagggtttttaacatgaagggatgttgagttttatcaaaagccttttctgcatctattgagaagatcatgtggtttttgtttttagttctgtttttgtgataaatcacatttattgattttcctatgttgaatcaacattgcatcccaggaatatagtctacttgatcactgtggatttgctttgygatagtttcctgctatttttgtgtggttttctaagtctttttgtagacctctaagaatttatgaatctgggtgttccagtgtggggtgcatatatagttaggatagttaagccttctggttgaattgaactctgtattattatgtgatcctctacttcattatttttwatcattgttggtttaaagtctgttttgcctgaagtamcaatatctatccctgctcttttttgttttccatttgcttgatagatctttctcgatctttttacttttagcctatggatgtcattcatgtcagatggttctcttgaagacagcatatagtttggtcttgcttctgtatccagcttgctactctgtgtcttttaattggagggatttagcctacttacatgctagtttaatatggaaatgttcagatttgatcctattattgtgttattagctggttgttacataaattgtgtagttgctttacagtgtcagtggtctatgtacttattgttgtggccagtaatggttttttgtttccatgtttagcactccttaaagatctattgtaaggcaggtttgttggtaatgaattccattagcatttgcttgtctgaaaagagttttatttctcctttacttttgaagtttagttggtctggatataaaattcttggttggaatttattttctttaggaatgctgaatatagatccccaatctcttctggtttgtagggcttctgctgaaaggtcagctgttatcctgatagggtttcctttgcaaatgacctgccctttctctgtagctgtctttaatatatattttttccacactgaccttcgagattctgatgactatgtgtcttggggatggtcatcttttatagtatatcagaggttctctgaattttctgaatatgaacatcgacctctctaacaagattgggaaaatttttgtggacgatattttcaaatatctttcccaagttgcttgctctctcttcctgtctttcagggatgccagtgactcataagttaggtctstttacataatcccacatttctcagaggttttgcttattttaaaaattttgtttttcyttatttttgtcgcactgaactaattcaaagaaccagtctttgagctctgaataatttcctcagctcagttgattctgctgttaatattgkgttatgaaattcttgtagtgagtcattcagctctattagatcagtttggttctttcttaaaatggaaattttgtctttcatctcttgaatcattttactgaattccttagattctttggattgggtttcagctttctcctgaatctctatgatattcattgccatctagattctgaattttatgtctgtcatttcagtcatttcattctccttaagaagcatcactggaaagctaatgtggtcttttggagatgagaagctttggcttttagaattgtcagagttgtcatgctggttctttctcatctgtgtgggatgatgttctttaactgtggtgtcatttgagcagtcaattggcttcatttctagatgttttcagagggccagtctttgtgcagggtctgtctttgtggctgaattcttgctcatggtttcacagtgggatgtattagcaaagtatttttgctattgtagtttcagctgcagttcagtagatggcacttaaacataagggccattagataggttctcactcagttgcatggctcctctgtatttcctcctgcttgcctccatcctctcagtgctctgacagtgtaggctcctctcccagtcaagtgctggccacagatcttggcttggcactcccaggctgcacactgcagccctggggcaagcttgggcttttgtttcctccctagcttaaggtctgcaggggcagagaccttggcagtggcaatggcataaggcctgtcgcttgtacctgggagctccaccccagagaaaagcataagcactgccaattggaatcatcacctacgggtggggtggctgctctgtagtcccaaactgggggccctgcatggttaagaagagcagggagtcagggtctcacagtgaagaaagactgggctcctgtctgtatggaagctgcatgatgaagctctgagcaaaatgaacagggtctttgttcactccccagcccaagagcagcaagggcaggtaccatggcagtggtagtgccagaggggttgtcagttgcttctgggagctctgccctggagaaacacagaggtgctgccaatgggaacgtttagctgaaggtgggacagctgtgttgcaggcctaagccagygggccctgcctggtgaagaaaaaggtgtgtagagggctctgggggaagacagtctggcctcttttccataggtcttctgtagtgtgctggaaatgtgagtaaagcactcaggctctttgttgttcctttctcagccagaaggtagcagtggcaatggcagagaggctgtcagttgcttgggggaactctacttgagagagacacggggctgtcagtggaaatgttcagctggaggtgggatagttactctgcaggcccaagtgggggtttctgcctgatgaagagcagggtgtcaggagctcacagggaagagagactgggctcctctctgtatggtggctgaggcatgttggatatgtgagcaaagcaatcagggtctttgtgcgttccccaacccaagagcagaaagagttgatatgctgccgtggcaatggcagagagcccgttagttgtttctaggtattccacctcacagaaatgcacagccacyaccaactgaagtgagaaggtggctgtggtgggagcccaggttgggaggccctgctgagtgcagtgtagcaggggcaaggaccagtgtcaagaataatctggctccttttctgtatggcatctactacagcatgttggaggcttgagacagtatttgggctcttcactacctccctagcctgagggaagtagaggtgagggccaagacagcagacagcaagcagcagcaactaagggtctgtcatttacctctgggagttctgtcccagagaaatgcagagctgctactggcccaaatgcttaggtgggagtagggtggctgttctggggtcctgggccagtgggctttgcctgaagatatgaagcagaggtgaggcttgcagtctgtcccttcctcagcactgtggacacaaaccctatcctgggggttagcaagagagcctggcattccttattggtgaaatacacacttacagcaggtggtgtcggggtgctcagggatccaagacccttggggatccatgtgagcctgagtggtagctctgcccggactctaggcagttgtccatgtcagtttggaggcctgggagtggggcgttgtggggagggtcacagggaaaatcctgtgcccagaattgcaaagatctatgggaatagtgtggtcactggggcctcttgctcacgcaccctttccccatggtggggatactcccttgcttccatgccaatccttggtgggcagctgtcctgcctcattcctctctgctctctgtggttcactgttgcttccttgctgaattccaacatggcttcctggacaatcttgtcgaagagcagtactaaggaaaatttatagtgtttactcacaactttatctccattccatgagagcggtgcacagtagctgcttcggtcagccatcttggcacctaccctctggaaaaaaatgtttatcctagagtagtatatccagccaaaaagttcttcaaacatgaaggagaaataaagactttcccagacaaacaaaacctgagggattttatcaacaccaaacttatcctacatgaaatgctaaagggagttttttaatctgaaagaaaatgatgttaatgagcattaagaaataatctgaaggtgaaaaacttactggtaatactaagcacagagaaaaaygtaatataataacattgtaaatatagtgtataaattactcatatcttgagtagaatgacgaaaagatgagtaaataaaaaataataactacaacaacaacttgtcaatacattgaaagtacaataatatataaatagaaataataaaaagttaacaatcagggcaacaaagttaaagtgtagagttttaaaattagttttctctttgcttgtttgtttatgcaatcagcgttaagttgtcatcggattaaattaataggttataagatattatgtggaagcctcattggtaccctcaaataaaaaaccatataacaggtacaaaaaaaagtaaaaagcaagaaattataacataccaccatagaaaactgctttcactaaaagaaagacagaaaggagggaaagaagaaaaagaccacaaaacaaccagaaaaataagcaacagaaatggcaggagtaagtccttacttaataatagcattgaatataaatggactaaactctcagtattagttctttctcacactgcttataaagacaagcttgagactgagtaatttacaaaggaaagagatttaattgactcacagttctgcagggctggggaggccttgggaaacttacaataatgaaggataagcaaacacatccttcttcacatggtggcagcaagaaggagtgccaagcaagagggggaaaagccccttataaaatcatcagatctcctgagaactcactctatcacgagaacagcttgagggtaactgcccccataattaaattacctcccagcaggtccctcccactacatgtggggattatgagaactacaattcaagatgagatttgagtggggactcagccaaaccatatcactctccaatcaaaagacataggctgtctaaatggaaagaaaaaataagtctcaatgatctgttgcctacaagaaacacacttcacctataaagacacacaaagactaaaaataaagaaatagaaaaacatacttcatgccaatggaaaccgaaaaagagaaggagtagctacatttagacaaaatatatttccagatagaaactatttaaagcgacaaagaagatcattatataatgataaagtggtaaattcatcaagacaatataataattgtaaatatatatgcatccaatgatggagtacccagatatacaaagcaaatattattagagctaaagaaagaggtagattcccatacaataatagctagagacatcaacacctcactttcagcattgagcagaacactgagacagaaaattaacaaagaaatatcaatgtaatctgcactatagaccaaatgaatctaatagatatttacagaacatttcattcaatggctgcagaatatacattattctccacagctcatggatcattctcaagaatagaccatattttaggtcacaaaagagtctttaaaaagttcaaaaattgagattatattaagtatcttctctgactataatggaagaaaactagaaatcaataacaggaggaattttggaaactacacaaacacatggaaattaaacaatacgttcctgaatgaccagtgggtcaatgaataaattaaaatagaaattgaaaaatttgctgaaaccagtgataatggaaacacaacaaagcaaaacctttgggttacagtgaaagtagtactaaaagaaaattttatacctataagtatccacatcaaaaaattaaaaaaattcaaataaacaagctatcaatgcatcttaaggaactagaaaaacaagagcaaacaaaacccaaaattaatagaagaaaaaaaaataaagatcagagcagaaagaaataaaacaaagaaaacaatacaacagatcaacataacaaaaagttggttttttgaaaaggtaaacaaaatcagcaaacctttagccagactaagaaaaaaaagggagaagaccgaattaaataaaatctgatatgaaaaaggagacattacaacaaataccacaggaatttagaggatcattagaggctacaatgagcaactgtacaccactaaattggaaaacctagaagaaatggatacattcctagatacataaaacctaccaatattgaaccatgaagaaatccaaaacctgaacagaccaataacaagtaacaagacctaagccataatgaagtcttccagcaaaaaaaggcctggtacccaatggcttcattgctaaatttcaccaaacatttaaagaagagataataccaatactactcaaactattctgacaaatagaagtgaagggagtactttcaaactcattctacaaggccattattaccctgataccaaaaccagataaaaacacatgaataaaggaaactacaggccagtattcctaaagaacattgatgcaaaaatccttgacaaaatactagcaaaagaaattcaatatcacgtttaaaagatcattcatcaagaccacgtgagatttatcccaggatacaaggatggttcaacatttacatatcaatcaaagtgatacatcatatcaacagaatgaaggacaaaaaccatatgatcatttcaactgatgctgaaaaagcattggataaaattcaacatcccttcatgataaaaactctcaaaaaactgggtatagaaggaacatacctcaacacaataaaagccatatatgacagacccacagctagggtcatgctgaatggggaaagactgaaagcctttcttcaaaggtctggaaaataacaaggatgcctactttaaccactgaagttctagttagagcaatcagacaagagaaagaaataaaaggcatccaatttggaaaggagaaagtcaaattatctttatttgtagatgacatgatcttatatttggaaaaacctaaatacttaaccaaataacagaactggctaaacaaattcagtgaagtttcaggatataaaattaacatagaaaatcagtagcatttctatatgccagcagcaaacaatctgaaaaagaaatgaagaacataatcccatttacaatatccacaaataaaataaaatacctaggagttaaccyaagaagtgaaaggtctctacaatgaaaactataagacattgatgaaagaaattgaagaggatgcaaaaamcatagaaagatattccatattcatagattggaaaaaataatattgttaaaacgtacatactacccaaagcaacatacagattcaatgcaatccctatcaaaatatcaatgacattcttcacagaaacagaaaaaaaaatcctaaaatttaaggtaccatgaaacacccagaatatccaaagctattctgatcaaaaagaacaaaactggaggaattgcattacctggcttcaaattataatacagagctatagtaaccaaaacaggatagtactggcataaacacagacacacagagcaatggaagagaataaagaacacacaaacaaatccatacatctacagtgaactcgtttttaaccaaggtgccaagaacatacacttgggaaaggacagtctcttcaatcaatgatgctgggaaaactggaaactcatatgcagaggaatgaaccaacattcctatgtctcatcatattaaaaaatcaaatcaaaatttaagacctaaaactatgaaaatactgaaagaaaacattggggaaactcttcagaacattgaactgggcaaagatctcttgagtaatatcacaagcacagtcaaccaaagcaaaaaatgaacaaacgggatcacatcaagttaaaaatgcttttgcaccacaaaagaaacaacaaagtgaagagacaacccacagaatgggagaaaatatttgcaaactctacatccgacaaccagttaataactgaaattacaaagaggtcaaacaattgtatgggaaaaattctaataatccaattgaaaaatgggcaaaaaaatctgaataagcattgtgaaaagaaaacatataaatggaaaacaggcatatgaaaacgtgcttgatatcattgatcatcggagaaatgctaatcaaaactgcaatgaaatatcatctcaccccagttaaaatggcttataatccaaaatacaggcaaaggaactcttgtatgctgttggtgagaatgtaaattagtacaaccactatggagaacagtttggaggttcctcaaaaattgaaaatagagctacaatatgatctagtaatcccactgctgggtatataccccaaataaaggaaattagwatgttgaagagaaatctgcatgcccatgtttattgcagcactattcacaataggcaaaatttgcaagcaacctatgcctattaacaaatgaatagatatgcaaaatgtggtacttatacacaatggagtactattcagccataaaaagaataagatcctgttgtttgaaaaaacatggatggaactggaggtcattatgttaaacraaataagccaggaacagaaagacaaactttccatgttctcacttatttatggaggctaaaaattaaaaagattgaatttttggagacagagagaagaacaatgggtaccagaggctgagaaggatagtgtggtggtgaaagygtggatggttaatggtacaaaaatatagtgatatagaatgaaaaacgtctagtatttgacagcacaacagagtgactatagtcaatgataatttcttgtacattttaaaatgaaagagcataattggattgtttgtaacacaaagaaagaataaatgcttgaggtacaggataccctattttccatgagtataagcrtgcaatgtgtaatgtgaccattaagcattgcatgcttgtatcaaaatatcttatgtactccataaatatacacctactacatactcacaacaactaaaaattaaaaattaaaataatgaaaaacctttcagtagcctcccattattcttataagaacccactgcctttgaagttcccgtaagagtgaaaaacctgctttgcctcctttcatgaactcagcactcaytgtggtgtctcaaaaaaggcagatgttctatatacacctgttgaagaagtgaattgagttggtggtaccaaagctgcttacaaaatgtaagatatatgtatatgtaatacaggaagtggcatgcaaaacacttaatttaatagtctcagaaaaactgtccttctcctcttgtcatctctgtagcctcatttattcctkggcatgggctctctaggatcaccagcgatctttttatgtgaatatcttcctagcctcaagcaactgggtcttctctccaaggagcccacagagtttggtgcttatttattgaatagcaggcatttaataaatgttcattgtagttgatattgatggtttcacataatcatggttgttaacttgtcaaagtcttgtgccatttccttctcataagctgtaagtataagaagggcacagtgggaagagcagaggccctgtaatggtgggtcctagggtttgggatggttgggcagggtaggcttggctttgggaagccttgaatgacagacaaatggtttggttgggatggcctgggagatttgtaagcagagaggtaacacagatgataagtctgaaggaatggaagggggattggaggagacagactctgacgacctcaaacccctttcctaacatcactttttctgagcttgttcagcacacacaccrccattcatttattctttcaacagacactagaatgtaagccccaggatggcaggggctgtgtctgcttcatttaccagtggttttttggtgtctagtacaggggctgccacatgataggagctcaataaatattactgcatcaacgtttattggatacctactatgtaccaacaaagtggtgggttctaggatgcaaaaattgaaaaaagactcagtctctgtattgagggagttaacataatattccttttcgcaagagggcaaggaaaaaggctgaatgcaaaaccagaatgtcaacagggtgctaacggagaccaatggaaggggcaactgactctccccagggaaggtaggcaaggagattgagggaagtagcaatgaraggagagcttgcaaaatgaagtcatcagagctttgcataagaaacaattcatggaccttagatcaagtagtgaggattaaaactatgtctatgtgaggctttggctagtttttctacctaagacatccttacctctcctttccacttgggaatcrtcttcctttcctaaccatcatcatcaaccctcaaggcagtcaggggcatctgtggcgcattcccccagcacttggccccacacagccaagctctaacacctacycaccccactgctatttccctctcataagctttaagttgtgggggagcaggttattttgtctgactcacatagttcctgtgtgggrgtacctacaaattttggaagcctgtggcttataaaactttggggctctatttaaggaaaggaatacaaaattttaaatataaaatttgatagaaaaatgaatatgtctttagaacaaaaacccaagtaaatgccaccttattgaaggctggcaaaatgccacaaattccaggtaaattatataatatttttattaataaattatctaatcaaccgctatagtaactgtttctgtatttttggtgtacactgattatctcataatttttactttcattatcttcagagagaataaacagataatttattttttctataacatgattgaaatttgtttttttattattgataccatagatacgtaagacatattgcttcacacacaaatatactgaaatgtgtagttgtagaaccactaaagatttgtgccttacaaacaggaattctcatacattgatttcacacaattctccacagaaatggggaagaaaggatgtgtgtttttgctttattatcaagtatattcctgacaaggagagaaattctgttttgatcagggattagagagaactagaccccatataacatgctctccaaacttcttctcaagaccttaagacctagtaactcaggagagtggacagcaggggtgttctggaatctcttcttacacctagacagccagcaaaacaactcttataaaagtcrgtgcaaaagatgtcaatataaccactaactatacacaaatgaattttcatcctatcttgttcttatctggatctcaaaggtgtctgtggccactggccatgaggagaagcatgatggagaggatgttaatgtgggaagagatggcagtcatacctaactgtggattaactatcttactttggcaaattaaaaaaaaaaagatgaaaatatgtaaccagacaaactcatttctagagttcctctaagagcctcagagcttatgtagatgtgaggctctaaagctttagttcattagctacatgatgaatctgcctctgctgyctctgagtaggtggtaaacacatactgaatgaatgaatggcagaaataaaataaaaagagcattgaacttggactcagatagcctgtgtgactttgagcaagttacttaactactcagtttattttctcattttyaaaatggggttagcaatctataccttacagataatgtatttgaaaatactctgtaaatcaaaatgtaaaatacaaatagaaaaatagtttttagaaagataacacataatagaagttccctaacttaatatctcaatgagtcccagttccagagatatcttctcaatgattagactgaagagcacaactcaatagatctctttgttccttcaaaagcagagatggagctatctctgagaatggcattctctccatctacttagcagcctaagagtcatctttgacctgtttctcatgctggctcatatctaaactgactcctctttttaaaatttctaaatttttctcaaattcatcctattttcttcatctccaccctcagtaccactttagtccaaggcatcatggccatttctcacctggacaagtgcaatcacctattagctgctttygataccctccattccactctccaccttgcagccagagtggtcttgtcaaaacgcacatctaatggagccacctctgattacacacttcaagggcactccacctctcaggataaagataaaagttccttgccatggttgacatggtctaccccaaggagctttccactcgcatcttcaaccaagttccccattgtttctgcaatatgacctttgctcatgctattccttctgcctggaaggttctggaaggttccaggttcttcccttcccttttcatctagatatttctactttgctctctgagattgcaaaaacttcctagggaaaakttctcasagcattatgtacatctccttcatgacacttgttaagattacaaatttgaatttattcctgtgatttgactaatgtctgtattagtctattctcatgctgctaataaagacatacccaagaccgggtaattaataaaggaaagaggtttaattgacccaccattctgcagggctgaggaggcctcaggaaactgacaatcatggtggaaggggaagcaaacacatcctttttcacatggtggcaggaaggaaaagtgccgagcaaaagagaaaaaagccttttataaaaccatcagatatcctgaaaactcatttattaccatgagaacagcagcatgggggcatgagaacgccccaatttgggtggtggcacagccaaaccatataaatctccatttgctaaaagaaacataaactcaggaaggcagttataatcatagaacctagaaaagtggctctcttgcagcaaaagctgaacaaatatttttagattgggtgggtggatctcatgtctagtcccccaagtgtctccttagccctagacctcagccacctttttccctggtgagacagacacagaggaattagcaaaagaatttatatccacaatcaggtctgtgtcttatcaggaaactgagcaccccatggcctgatggactgtgtacctcagaatatgtgcctccaaaattttttattagatgagtagtgactgcagtctccaaaactcatgctttcaaatggtcaaacctaccaagtccctgcaagggtcaggggtctctaagtggataggggtgtttagaccacgccccttccactaaacattttgcttcccttgagaaccagagggaaaagataatggggactttctccagccctgacatcaccatacctgatattttgctttctatcccagaagactacaatatctcagactyctcatccacacaatgagaatactaaaaacctatcagtcaacagtaatttattgtacatttaaaaataactaaaagtataattggattgtttgtaacacaaagaaaggataaatgcttgaggtgacagataccccatttaccckgatgtgattatgactcattgtatgattgtatcaaaatatctcatgtaccccacaaatatatacaactactatgtacccacatatattaaacattaaaaaattttaaaataaaagcrtatctcattggactgtagaaagtatcaagtgagataacctttccgatgtgcctggtactgaataactaagtgctgaattaatttttgtttctctctctttccagaaggaatgaaatagaaagaataaagctgaaggacatttcatttatgttcaactagaaatccaatatagttttaggcaaactatattttcccttgcaactgtactcccttacatacatgtaagtgggaaagaayaaatgtgacaaacaaaatatcactcctgattccacaatctaaacaaaacactgcctctttctaggttttgttttttggtttttgtttgtttgttttttggcatagggttggggtgtatgcttcttgacgtacctacataatgaggaatacaaggctttgtatcttttatcagtaattattcatagcttaattgtgtaaattgtaaaatatcacacttttataatcttaatttttttttgtggctgcagctattatttgaataaactgtaattaattattttccctgagctgaagatttcatttctccccacactatctggaatcatgttgccctgaacatacttgtgcatatttttctacatttctgattatactagtaagcattgaacacataatgtgcatcaggcaccatgcttagtcctgaggatttagaaatactgatatttgatctctgtcctgagagttcttagtccaggagaggagacagaagagtggaaacaaaatcacaagagagtgtgtgagtttgcagagaaaactgccaggcagtatctgggccaaggaaggatgcccacctctgactaggagcaatgagtcagaaaaaaaaaaaaaaaaaaacttttttgaagatgtagtgtatgaattgacctggtgagtgttgatccttactcctaagccttccattttggcagcctcccctagctttcaccttgaatttttcttcagaccaagcataccctgataactttgsatttgatgtccctttctctgttatcaatggctgagccttctctgcccctaagtgtcttctattcctaatgacattgttgctctgtcctctgagccatcagacttcaatccagtcctatttgtgactttgctaccatagtaatagtcagtggggttgcggtaaatgtttagcaacccacccacccaaacaaacagtgcttgctaattatcatggtgtaaagactcactctatgactgacttcaagctaccaacatcatgtcactgaacacagaattgggaagagaggtacagtagcatattatgtcatatttctaccacatagatacaatggacataaaataacattaaaagcataggtagtaataaaatgcagtaaagtaattagaagtaatcttcttggagtatttattacctttgtttttaatataattgattcaatcacaaatttacataattttgtttttaattgtggttctgtttagaaatatgctcacaaaattattgataagttcttgaaaaatagtctctggaatgtctatgtgaactatcaggttggtgcaaaagtaattgtggtttttgcatttttttaatggcaaaaactgcaattacttttgcaccagtctaatacttttagctcacaactggctatgaaccagttacatgaatttgtcgtgcctacttctccagactcagcttacacctctctccttttcactctctttacccgcccccccaacaactggcttatgtatgctcctcaraaaagtcccatttactcatatattagagattttgtatagatgtttcctctaccagaaatcccttcccctagctctttgcatttggagcctttccataattcagttctcagctcaaacattaccttgttgaatagatcttccctcagcacccgacttaaaccagtatcccccatatagtctcttacctctttttaaaactcagtgtcttcttggtcactgtaagtactgagtttatcttgccttttttgtctatttatttaatgttcctgtttcctaataggatgtgaaattactttgagkagactctcctgyytatcataaacagtgcctggcacttagtacatcttcaacaaacgtttgttgaataaatgtgtgcatgaatgacagcacctcagtgatctcactctgatgttgccragaagggatgctcatgcaatgacttcagagtcttgagatcatacatataatgtatattatatatatattggtttgtacttaaacttggatcaaatgcacttgatttactaactgactttattatgactcaatgtaaagtctaaattctgctaagaattcctggaatagcctgcctgaaatcttattttaatgaaaaccatgacttcataccttaattgcattgggtttatgtgggctttggctgatctttagatttctgggttgtctgtgagggaaaagttagactaaaacgaaggatgccattgaaacaaggttctgaagaagttcgtgagtcatgctgacttattaggaagtctcctttgtgtctgcaatgagacgttgcatttttctctgaagtctgatgaagaaagaacagttttaggacaagtaaatccatcttaaatatcaatccgtgtctcttagattgttgtgattagatttgattgtgagtgacagaaacgtcaaaaaaatgagtttaaasaaagtagaagttaatttttctcatcaaattctaagtcagcagtctaaggctgctgaagtgatgctttatgatatcaataaccacaaatgcttcttctgtcttgaacctttcctcctttgctctgaaaaacatgtctccattcctaaatttaccttataatgcaatatggctgctcctgctccagtcagcatatctgcattccatcctgcaagaaggagaaaataaaaggagaagggtgtgcctcctctatggacactacttaggtattgcacagactacttctccttgcatttctttggccaaatattagacctgtagttacactcagctgcaagaaaggctgggaaaggcagtttttattctatgaaggattggggaaaactaatattgagtttccatttccaygcgaaagaaggaaagaaaatggagaacctagctgtatatgccacaggtccctttctttcctatcaacttgccaagcaattcctgaacatcagtgtaacttctaggcagactttccacactttcataacattggcaaatgagtaaaccaggaatccaaatgaatttacacagtttattgttcagggcacaataggcaacatgaggtccatattttcattgattctccttgtcccccaagtccatgggtaatgcagagtagatccaggtgkatgctgagcatacagtttcacagccaaggaacactgagcttaggacattctgattcatacagaagctgatggcaacttcctcatcctcctcttcaaagataggcattatctttaccttggcatggaaacaagttttcttctggtgagaggttgaagactttattattatggaatgtcttcagagatggagatgttctctgtaattattawactggacaataaataattctgctgtctgacccaaagggacagactagcctctaatgctctttgctgtgcatatatccttgaaaaggtagtccmagayatatagaaatgccatagaaattgtctctaacatctccatttgttaaattctttacaaatgcataaaactggttaaatatttaaggaagtagcttaatttaaaaaaaaaacccatcagtctagttgctgctaatagtacattgaatgtgattgttttgyttttgctgctttggagtttgagactttctatacaggacatgcatgctaagagatggagaatcccattttgcagcattagattcaatactcactgtaaggatttataagaacaaaccagaagactaaaacaaatggctgggaagagaatttcactagagatgtgtcaatgtgctgtgacatttctcttttgcttccattggaaggggagaagtattccctcctctttaccttataccaagttagggtgkttaaaaagaacctaccagagagcttggcctacgtcctctggattttgcaggtgtagaaactgcctaactcgtgtataaaggcaagaaactggataacttctttgaatattgagcatagacagaaaagaagtccagagaagaagctggactccaccattggcaggacaaaggtatgtttttcttaaaataggctgcacggtgagataaccccaaaagacaattgattgtgggatggacctctttaagtcaggtggtattatctggactgtgagaccatgttgaaaaacctctgggaaatccccaagacaggtacaaaatatcccattagagaaataatcagaatttagacatcttaggtgtagacagttcacagaaataacaatagaaattacttttaaatatgtacaaacattgctcaaaataargtacattctaatttaaactataatatgtttttccccctctagaatggtgagaatcaaaaattttggtaagttctcatggatggtctataggccacatgcctgggtacctaacatttgttctggtcccacagcaataaatttataaatgttcttggttcaagcaacttacattagcatgaagagcttgaatatgattaatgagaagtttgttcaggcataagggtaccctgtgctatatccatttcaccaaactgtgcaatgtgtgattaacgtgttatgctgaaaccaagtttgttgtatacagtcaagtccctgtccagaactgctttagtctcatgctcatcaggctgtgtgtgaaggaggagctgagcttccataaggtctagcatatctctcattcacgcaggcattatcatycacaagtgtgtaccccctgctgtaaacatatcctgcttgttcataggtgatactgatgatctttttgctgtgaatcttgactcagcagacctcttgatttactcaagtgatgtctggtctttctgtaaatctgaacttacttgttgacatttgcccagtggtaaagtatacaatgtcacattgggttgaaaactatagggaaagtggacattcttatattttgttggtaaaatgtaagttggtagaactcatatggattgatagaccatacataaccgtttaacggagacagtccaatttatatctggttttttttctgtgtaattataactagtacctcctttcactatcaaaacattccaacatggataataaattatatggtcatcctctaaagggtaatttgtcagtatgtactaaaatgatacattctcatgtcctttgactcatacattcaacttaatgtattatttcacatagctatcttcttacacatgtgtaaaatgatacatacaaagttcttcattaaagcattacttgtaatagtgaaagattagaaacaacataaatgttaatacttaccaacagagtactgatgaaataaattacgataatccacataaaaatacaatggagccattacaaaagaataaataaggtcttcctgtagtaaacagcrtgacctcaagatatatcattaagtttaaagtttaaaaaggcaaggtttagggccgggcgtggtgactcacgcctgtaatcccagcagtttggaaggctgaggtgggtggatcatgagttcaggagatygagactaacctggccaacatgatgaaacactgtctctactaaaatacaaaaaattagctgggcatggtggtgcgcacctgtagacccagctactaaggatgctgaggtgggggaatcacttgaactggggaggtggaggttgcagtgagctgagatcgtaccactgtattccagcctggcaacagagcgagacttcatctcaaaaaaaaaaaaaaaaaggcaagatttagaatcatgtatagtatgctactatttgtgtaagaaaaggagggaaggaatatatgcatatacactatcataaatatttgcttaaagatctctagaagaaactgacaacattggttatctttggagaagaraatcaggtgcctgatgaacaggggaatgtgaaataattttcactaggttttatattttgatgtttgagccatatgagtgctcacctcctcaaaaataaatgaaaaaagttatatctaaaaggaaaaaattatataacttggagcaaaaaaataaaaatacagcaaaaaaattaaaatataagggataactttcaaatcagagaaagaaaatttgatctatatatctagcggaaagttaaaataggctctatggtgagaaaatcccaaaagacaattgattgtgggattggcctctttaagttargtggtattacctggactgtgggaccatgttgaaaagcctctaagaaatccccaaggcatgtacaggtatatctacaatgcaggtagattaaagatctagctatgatagatctagatgctagagagaagagcacctctttggaactttgggatggggaaggacttcttaaacaatactctatagtacaaaccacaaaaatttttaaaaggatggacttgttatttcaaaattacttgttttattgtttaatcaaggaaggacaccagttgacaattaactgacagtgacacattgggaggcaatgtgttcagtgactgagaagggcacagagctaatatttggacacagagctaacagaaattattgcaacaaatctacaagacaggaatcctagtagaaaatgggtagaaaatatgatgataaactattcatagcatgggaaatctaagaggtataagtatataaagagatgctcaaactcatgagttatgagagaaattcaaattaaaaacaacaagacaccagcttatgctgatcagattggcaaaaattctgacctttggagaataccacatattaggtatacccaccaataggaactcttttgcctgctggttggtgtgtagactggtccaagccactctaaagggcaatctggcagcactttgtgaaattaagagtgcatgttccctatgattcataatagcaccactcttctatcccagaaaatttctaccccaggcctataagggaagaaagataaggaaatttatcacaktattgtttggggtggtgaaaaattagcaatgacttagatgtccataactggaaaataaagaagtcaagtgtggcaaatacacactgggatattctgaaccatttagaaaagcaaagaactagatayatattcagcagcatggctggatcctaagaacacagttgaaagaaaaaagaaactatgaaatctatagtacatccatagattgtagtaaatctatagtgccacatcacatatccatgaaaaatacatatacgcacaaacatttctatgtattttacaagttcaaggctaaacatcrtattagagaagttgcctctggggaaaggcagtgagagtgaggaattatgataaaagagaatgaataaaaaaacaagagaagggtcatgtaggttttgtttctgtgccatgaactcatggattatgattaactcaaccttctgcacatgaagataaacaagaaagaactgataaacctgcaatggttgggtaatcttcaacttccaaatcagcaaaggtcagctctaagtttgccaagtacacaacttctcatcttgtgacatgttccccacctctgtgcagtgttaaaaaatacctcagtggtctactgactgactgtggatgcttcttctagatgtgcctttttttcctcmatttccttagcacccagcactgctctcattatagcagcacattgcattccaaccaaattgaacaaaaaggtggcttaaaaatcatctgcaagtttatggcacaagcaatctcttatttttatcttagtgcataaataaatttttcctttttgccagaataattttttttaaagaagygattagtttttcttctctcagatagcaatgatgtgctttcctctcaacctagatttagggcatttttatgtgagataggattaaaaattccatttttgtacaaccactatggagaacagtttggcagttccycaaaaaactaaaaatagagctactatatgatctagtgatcccactgctgggtatatwcctataagaaaggaaatcagtatatcaaagagatgtctgttcttttatgtttgttgcagcactgttcrcaatagccaagatctggaagcaacccaagtctccatcaacatgggttttaaaaaaatgtggtactttaatacacaatggagtactattcagcaataaaaaagaatgagatcctgttatttgcaataacatggacagaactggaggtcattatgtcaaatgaaataagccaggcacagaaagmcaaacatcacatattctcactcatatgtggggtctaaaaatcaaaacaatctgattcatggagctagagagtagagagctaattaccagaggtggggaagggtagtaggggcctggaggggaggtggagatggttaataggtacaaaaaaatatagaaagaatgaataagacctagtatttgatagtacaacagggcgaatatagtcaaaataatttaattatacatttaaaaatacctgaaagagtataattggcttgtttgcaacacaaaagataaatgcttgaggggatggatgccccattttcaatgatgtgattattacacattgcatgcctgtatcaaaatattgcacatactccatgaatgcatacatctactatgttcccacaaaaattaaacattagaaaaaagagttgcattttcagctgttatggggagaagaaagaaaagctatcattttgttgtcctaaaaattatgttgtcctcatttcaaacaggaaagcaaaagtatttgagagccagtgcagtgcyttggtgttgggtgaaacatagattgaatttgggccatttgtttaaacttcctaggcctcagtttcttgcctattaaaagggagtgcatagttcatgggattgttaagaggaagaagtgaaaccatgcacgtggagagcgtggcacagtgtmtaagacagagtgtgcatgcaaataagtagataatattctttgcttttctttattgcatgcctgtaatatttttggagytgtcacattcattgccctcaagtagcatcaagggatgaaattatgtttgtaagaaaatcctgaggctgaggaatacaacatgttttatgtctactacactgaaaaatgccggagtcagataaagaatacagattctcctgaggatggaaatcaagatcttcgccttcaatatttaacaacattgagcttccaacttactatgggaaatattcatcaggcccctaaaggttccttttggacagaaattgcacttgttatatctgtattcttagcagacagtagacagcctggcacatcataaaggcttaaggaatcctaaatatcccttaaaattctcattttaaagacaaaaacaaaacaaaaaaaaaaaacaaaaaaaaactgaggcatgggcttgaccaaatcagtggtagaaccaagagttaaaccacttgttttgaatcctaaacctgagttttattttacttatttatttatttatttgtttatttattttcagatgcttggtcaaagaacagtgggaggagagggatgggcttccagcaacctttattattggcttattttcttacagcccattactttctcttgggaaaatattaagcaggcacycaaggcttgaggcccctgagttttcacatcctttctgaacctctgaacctgctttccagcattcttttatactttgttttacctsctggtcagtaatgcctcaccctcagtcttctctaaaagtgtggttaatggcatcttcctgactatttgaagaccactggccaaatcccaccagctcactcatagaccatccccctactttactttcttcaaaagacttagccctacctaaacttatttatatgtttattttctgcccaccagaatggcagcatrgctggggaggcagagtctgttttgttcattgctgtattcccaaagactagaacaccaccaagcacacggtacaggtctcagtaattattgtcaaatttatgtggatttgcttttaaacaatatcttccatttactgagtgtttatgtggaagaactgtactaaattttaatgcatttctttattcctattcttaaaaccttccagcaaggtggctctaccaccctcttttccgagcttcaggagcagttgtgcgaatagctggagaacaccaggctggatttaaacccagatcgctcttacatttgctctttacctgctgtgctcagcgttcacgtgccctctagctgtagttttctgaagtcagcgcacagcaaggcagtgtgcttagaggttaacagaagggaaaacaacaacaacaaaaatctaaatgagaatcctgactgtttcagctgggggtaaggggggcggattattcatataattgttataccagacggtcgcaggcttagtccaattgcagagaactcgcttcccaggcttctgagagtcccggaagtgcctaaacctgtctaatcgacggggcttgggtggcccgtcgctcccyggcttcttccctttacccagggcgggcagcgaagtggtgcctcctgcgtcccccacaccctccctcagyccctcccctccggcccgtcctgggcaggtgacctggagcatccggcaggctgccctggcctcctgcgtcaggacaacgcccacgaggggcgttactgtgyggagatgcaccacgcaagagacaccctttgtaactctcttctcctccctagtgcgaggttaaaacyttcagccccmcgtgctgtttgcaaacctgcctgtacctgaggccctaaaaagccagagacctcactcccggggagccagcakrtccactgcggtcctggaaaacccaggsttgggcaggaaactcyctgactttggaywggtgagccacggcagcctgagctgctcagttaggggaatttgggcctccagagaaagagatcngaagactgctggtgcttcctggtttcataagctcagtaagaagtctgaattcgttggaagctgatgagaatntccaggaagtcaacagacaaatgtcctcaacaattgtttctaagtaggagaacatctgtcctcggtggctttcacaggaatgaatgaccattgctttagggggttggggatctggcctccagaactgccaccaattagctgtgtgtctttggacaagttactgtccctctctgttgtctgtttwctcttctgtacactgaaggggctggtccctaatgatctgggatgggatgtggaatccttctagatttcttttgtaatatttataaagtgctctcagcaaggtatcaaaatggcaaaattgtgagtaactatcctcctttcattttgggaagaagatgaggcatgaagagaattcagacagaaacttactcagaccaggggaggcagaaactaagcagagaggaaaatgaccaagagttagccctgggcatggaatgtgaaagaaccctaaacgtgacttggaaataatgcccaaggtatattccattctccgggatttgttggcattttcttgaggtgaagaattgcagaatacattstttaatgtgacctacatatttacccatgggaggaagtctgctcctggactcttgagattcagtcataaagcccaggccagggaaataatgtaagtctgcaggcccctgtcatcagtaggattagggagaagagttctcagtagaaaacagggaggctggagagaaaagaatggttaatgttaacgttaatataactagaaagactgcagaacttaggactgatttttwtttgaatccttaaaaaaaaaaatttcttatgaaaatagtacatggctcttaggagacagaacttattgtacagaggaacagcgtgagagtcagagtgatcccagaacaggtcctggctccatcctgcacatagttttggtgctgctggcaatacggtccccacaactgtgggaaggggttaggggcagggatctcatcaggaaagcatagggrtttaaagttctttatagagcacttagaagattgagaatccacaaattatattaataacaaacaaagtagtgtcgtgttatatagtaaatgtgaatttgcagacacatttagggaaaagttataattaaaaaaataggctgtatatatatcaatggttccaaaattttctatggttaagaatcacctgggatggttttgaaatggcagattctaagacaacttgattcaacaggtttaggtaaagcccagggaactgcattataagaaggaatcacctgtaattttggagtcaagatccaaggaacactcattgagaaacactgatttacaaagtgcatggagagaaatggagcaagtgaagggggatcagcatggtgaaatataggctgttaggagtgctattgactawctgtctggtgactggaccagagtaaatcttttactttgcaagaaacaggactaaattcccatattatgtccatagcaaagggaattatgtagaaaaattgataattaggagcctgagttcttgaccagcctccactacctatgtggcctcaggtgagttattttctccctttggctctaagttttccccatctgtaatgtaagggagtttaactagatgagcactaaggacaaatcaatttctgtgagtcaattattatgaaataccatgtgggcatcaaatgccaagtggaaagcatagataaagaagtgattgtgcacctgggctgaggggaacaaacatttcctaagagaattgagacccaaaagagcctttaaggaaggtgagatcttggaaagggaaatttggtgaatactctaatgaggagctaaaaaggcaagaaagaaagcagcttggctggaaaggaggttcctgtaggtgggcctccagagattcggtaccacagaaactgccaaacatcagcaagaagccatggggatggagcgtttgagggattctaaatagaaggacaagagtaaaaatgtcaggctggatcgatgcaggccactaagaaatggattcaggtgatggcagtgggaagaaaggacctgatgcccagaggcatttctggagaagaygagatcagacttgtgattggctgaacacacactgtagtggggtggggtttagggggtgactcaacttcaagcccaggtacattcaagtctgaattgccctagtcaaaagtggcatctgtggatgtgtatcagaaatatcttacttttcttggaagccaacaggagaaaagagtgctaccaagtgaactagagacaggaatatcttttgtcatttcaaggaaactggaaagaagaaggctcagtattctttagtaggaagaagacttaagtcagagactcatctgtacctctctggcagggtttaaaagggggaagaggaatagaggctgcaagagattgtgattcatggacagtatgcagagatcaaatgacctgggttcagatcctggctccwctgctaactgtgtaactataggcaagttccttaacctctctaagccttaatcttgtcatcaataaaagggggcacttggtgcctaataaaacctacctcttaggttgttgccaaattacatgagataatccaaatcaagtgcttattataatacccagaaattataggctctaaataaatgtttatataggctctaaataaatgaagttttttagaaagataacatcatgatcaaaatgggatatttaacagtttagtcttccatttcatttgaagctccctaaaatcactcttgctgataaatttgttttttccttcacacctcagtttcatgggatgttttggcaaaaatctgaattttctgaattgaaagaattttttgctaagggtcatcagtattcatgcagggcttgttaytctgagtcactaagagtttcctaacacagccttctctcattgagatgatgtaacatctattccattaatttcattaacttgcttacaagagagtaattgttctgcaaatttttttcttcccagttttaggtacctgctgcttattgtggacacacatagaattttatgtattatttttcgacttaggctaatgatttagcaaactctggaatgtcagccctaaccccaaccttggttttctgtcacatgcaygtagtaagtgctagatcctggacattctttgagatttagtttaagactaagtttattttctgataggttatttgtgtactttcatggattttgtaactctttttcaacaattggatgtctcagatctcagcatatgggagcaagttaatgcttcctgagatctttgccaaaggtcaagaggtcatttttgtgtatttataattttccatcatttttatatayttctcaatattctttttaaactattcttttccttttttcatcctctgaatactgttttgacagatcttgttattagcatgctttcacggatgagaaaactaagaaagctgaatgatttgcccaaagtagtccacctggaaaatgaaagagagaggattccaatccaggtcttacgattcaaaagcctgtgcatgttccatttttagtactttccacactgtatttctcaatgtctttctgggacattttataaatcatattatatcacctctaaggatctttcagtttgttatatatgtgtctattaagttagattgtgagctcctaaaagataaagcaytgtcttattcatctttaaatttctcagagcccaaatagtgcctggaacctagtagttgctcaataaaaggtattgaatttacaggattgaatggtgacatcaatgaataattgaagattccttaagctgataactgacccagtagcatcattgatcatttaattgccctggacttacttattttccaccacactacatatttctgtatagaatatatatagctcattgtattgcaagatttaactagaagaaagagttcatgcttgctttgtccatggaggtttaacaggaatgaattgctaaactgtggaaaatgttttaaacaaatgcatcttatcctgtaggaaamaagctatattgaagacaactgcaatcaaaatggtgccatatcactgatcttstyayycawagaagaagttggtgcattggccaaagtattgcgcttatttgaggtcagtgctacaatcatgyttgtcttggataatgtcgtagcaaacttccatgttcttttctagttagatgcaatgaaaagaacacaggatctggaacaggcagatttgaatttgagctcaagtttttacattaaccaactgtgtgaccttagttaagtcattcaatctctctgagcttcagtttttccattcataatatagtgctgataatatgtgccttgtcagtttcaacaggaactttgtgatgaaataatgtgttttgtaaaatgcctaatcatatgtgtgattaggcatgattaactataagtcatatgtgacacgtgattacatttcacataacatgtaatcacatgtgtcacatgtgattacagttaaagagtaaacaagaaataaatattaattcttttattcactaaattaatattgattgtcttctatgtataagtgtaaaataatatgcaagacaccgtccctttcttcaagtagcttaacccaaaactatgctttagraaatagctaatgttcttcaagacattggtaaatgtcttatgattaaagtggttccataattaataaacttgggaaattcgggcatattattttacctgatttctttattataggacttttagagtctataaaactaattatactaagttgtttacagagagaaatgtatgtattattttccaaacttacttgactgtggatcctttttattttaagaacatgtattcacatctgggaacagagtttaggaaacgttgatttgggtgtttgctgggcagccaaacttcacagaactccaaataggtttcctcagccagattccttccgagtactatgctaatatttttggtgggattttgtcccacctgaaaatacattgctttatgctaagattcctgtgacctctctagctgattgggaggcaggggtagcacattggtcagggctgtgcacatacttagtgctcagtgtgtttgggcatgcaatcaacaaatccttttggggcatgactggatacgattagatatcttgtgaaaacctatgatgttctcagcactgtgggtggggaggaagatgggggacacatagaaattgtaaggaagagaaactgcctcctttaggatctaacaggggaagcaaatattctgagyagctggggagggaaggcagagcatgagaagttatctcagtaaaaggtagctttatagacatgatcttattcagtctaatgaaaataacatgaggtaggagctatttctgcccccatttttcagagatagaaactgatgcttagaggggttaggtaaatgtgcccaaggtcaaacagctagtaaatackgaagaaatcatttaaacccaggcattctgagtctagaacctacatacactcttaactgctattcagtactgccccagacagaacgggcttcatagtttgcagggcgcagtgcaaaatgaaaacgtggggtctcttcctcaataacaggaaataatgctgttaaaagtactaaaatatataactttatcctttcttctgtggtctctctcatgtcctgttatggtgtttttgatttgccatttagttgtgctctcctcccctgggcaccttggccctctaactgctgggttccctgtccagccagggctgggctgacagccaagcccctaccaaggatggggaaatccatcttccatttccgtggacctgctgcaccaacccacagtgatgagctatcccccaagagattgtaacctctggaatgagaatggaaaggaagcttgcctgaagccaaatcacccaccaaatcccctgccagatctcccagggttggcggagagtggcagcagaatataaacttccccccaaagcccatgcctcctggtcatgactctgggcaaagggcagtagtggtggtgaggtaagaccagggaggggaaggctgcgtgggtccagagggccaacgtgcttgaaagcaaccccttagaaccatggctgagaaggtaaggagagggcaaatggtgtgattacacatgagctgagtctccaaatacccagcatgtgcttcattgtcccactggactttgcttatgaaacacaaattcaaaagtcgttattaagaatttcaactcacgcctgtaatcccagcactttgggaggctgaggctgacggatcacaaggtcaggagatcgagaccatcctggctaacatggtgaaaccccgtctgtactaaaaatacaaaaaattagcccggcgtggtggtgggtgcctgtagtcccacctatttgggaggccaaggcaggagaatggcgtgaaccctggaggcggagcttgcagtgagcccggatcgtgccactgcactctagcctgggtgacagagcaagactccmtcccmaaaaaaaaaaaaaaaggaatttcaaggaggttgcaaagaacatgaaaccccaagtgtgattcctgtggtatgacagtggttgcatatcccagaagctggccctgacctcagacctcttttatcaagctttccctgaattaattacaatcttctcagtgttcccaaagcacttcttacttttaactgcagcacttccttgcgtgctcagcatatacattatgtctagccctgaggatggtttcttcaagaagagaaccttgtctcagtcatgtttatatcctcaacagaacctgagttttatatatgttgtgttcaattaagaatgaaattcaatctaaagaaaattttttaccttaataaatatttttaagttaaaaaaatattttaaaagtatcttttcactttttgagccaattaattttgttttttgagacagagtcttactctgtcacacaggctggagtgtagtggtgcgatctcagctcactgcaacctccgcctcccaggttcaggcgattctcatgcctcagcctccccagtagctgggactacaggcacatgccaccatgcccagctaatttttataattttagtagagacagggtttcaccatgttgcccaagctgatctggaactcctggactcaagtcatctgcctgccttggcctcccaaagtgctgggattacaggcgtgagctaccagccagggccaattaatttttaccctgagtttttaaatataattaaatcttgtgatcaaatatatgaataagtagagaaaagatagatctcctatttagagttccaaataatttaagtagtgggtttttatagtgactttttttccaaaaagtaccacatggaagggggagaagagtttctttacagtggagaaatatgacaaagacacctcagccatgtgaccaaaatcaacattattcaaaaagaaactgaatattaaaacaaacctttccttaatagtaaaaaaaaattaaaattaaaattaacatcatcagtgatgtcatgttgatggtatgcattcttggtaggatgaaaatggcacattacccctgtggtcttcctccacacaatccataacctccatctaaccatgagagaaaaaatcaaatgaatcctaattgaggaacattatccaaaatacatgaccattactcctgaaaactctcagggtcatcaaaaacaagtactgtctgagcgactgtcacagccgagaggagcttaaagaggcatgaagactagggccaggcacggtggctcacgtctgtaatcccagcactttgagaggctgaggcgggagtatcacctgaggtcaggagtttaagaccagcctggccaacatggtgaaacccggtctttactaaaaacacaaaaaaattagctgggcatggtggcagctacttgggaggctgaggcaggagaattgcttgaaccagggagacagaggttgcagaaagctgagatcacgccattgcactccagcctgagcagcgagagtgaaactctgtctcaaaaaaaaaaaaaaaaaaaaagagacatgaggactaaatgtaacgtggtattttgaatgggatcctagaacagacaaaggactttagatataaactaaagaaatttgaataaagtatggtctttcgtttataacgtgcatcaatattggttcattaattgtaacctatgttccacattaatgtaagatgttcatatgttcataatgggggacactgagtccaggttatgtggaaactctgtgctatcatttctattttttcataaatcaaaattattctttaaaaactgccttaaaaaattaaacctgggggaggagaatgtatgtctgagtgagagcaagcragcaatgggtgtagagaagagagacagcattttctgagcaacaaactgtccatgagaaagaatatatctgtaaaatgcacctatgtaactttttagcttttatattagataatcagcattttctccttgagaggttgccccttaggcctaagtcagagttaatagattaaataatagtaaatgaacagaatgttttcaacctaataaataaacgacaagtaactaaattaccagaattggatggaatgcactcaagacatgtgtgtttgtgtgtgtgtgtgtgtgtgtgtgtgtcggggctgcagggggtggtagggaggggggcgcatgcatgtatgtgaactctgggtgaactctctgaagcattatccagaatctcaactgcacaggtcagtaagtgatgttattacacccattttacagaagaggaaacagaggtcactgtattgggtgattgaagaagggttgttagtgagtattgatttttttttttccaaacatacttcagaagttgctgtataaattgtataggccagtatacttctcgccttagtaacagcctggcaaaatgttaaaatcactcaaagtgctgagttaaggctgggcatggtggctcacacctgtagtcccagcactttggaaggccaaggcgggcagatcacttgaggccaggagttcaaaccagcctggccaaaatggcgaatccccatcactactaaaaatacaaaaattatctgggcgtgatggcgcatacttgtaatcccagctactaaggtggctgaggcatgagaattgcttgaacccaggaggcagagtttgaagttagctaagatcaccccactgcactccagcctgggcaacagagtgagactctgtccgccccctccctccccacaaaaaaaaaaagaaaagaaaagaaggaaaaagatgctacgttaagagagagaatcaaattctagtatttgtggaaccgcattatgcaatgagctgggcacatatgactcttcatttaatccgcattaaactaagtgaaggtggtactctcactttatggatgagggaactgaggttcagagcggttgagtaatttgctcaagatcacacagctaatgtgcagtggaaatggcattgaactctgaatctcagattccgaagcccatgatctttctattacaccccacacctctgccaaatacagctatccctgaacatctgaatcactctggagttttttaaaaaatgcaaatatcctggtcccagtctctcattcttggggtgagggggcaaaagtacctgtctctgggtattttttctttcatattgaaaaatgcatttaaatgcaagacaattaactactaatattccttccatctattatcaaccgctgttaacatttggacatatcactttcattttttcctgtgtcattgcagtttcaaatattacaaattaacatatcatttcttaagaaaaaaattagaagataaagctacagtcttttctcatctctcctctatcctgatcattctaattctacaaactttctagccaagacagcatcattatgagtttagcatatttccttccagtcctttggaaaagtatgttgatattgacaagtgtcatgctatgcacattggtctgcagcctctttcagtaagcacaatggagtggccaagaggatggactccatggatgcagggctgtggcttagagagggtgacttgacttctctgtgcctcagttcctcatctgtaaaatggaaatagtaatcgtatctgcttcatagggtagttctaaagattaaatcacttaatgcatgtgatctaaagattaaatcacttaatgcatgtgatctaaagattaaatcacttaatgtgccctcagaatatttattaactgttaagtaagaattactatatatatattttgtgaatgcaacatttaaaaaatgtatacatgctgatacatatagatcaggttcataacttttaacctctgaagtatagttcttaatatctgtgtatcatattttatttatcatccctctatttttggcatccatggtgttttctagtttctatagtcacagacaattctgcagtattttgttcaatttttttggtaagtaatatgcaaaaatttctttagggtagatacctagaagtggaatctggtcgtaggatatggacatttttagttttaatcagaactacaaagtttttctccaaatgtcctgtaagaatttatactcccactggttcaacatgagaatactcatttctctatacatttaagaatatatgcttattattgcctttaatcttgaacaatataatgagtgaaatatggtaatttgttgatttaatgttcatttttctgactattagtgagatgtaggtcatatttcataacatttataatttgtctttttgtaaattgtgatttgtctacacattgtattttttgtggcaaatgtgcctttttcttaccgattttttgacattttatatactctgaatactgttatgtgtgttacaaagattttctcccagtctttctcattttacttgggtttatggtataatttgtcatactgaaatttaaaattctgatataatcaatactttcagtcattttttcatgtgttttggatttttgtttattcttgaatttttttttttttttttaaattccactggtgactctgatgccaagtcgggaatgagaaccattgttctaagctattgcccgggaaggggttcttgctgtgcatgagagactgtgttatcacttcacatgaattaagtcatatttaatactcatcacagtgctgtggggagtcagcgatgccatactgatcttagagaggaggaaactaaacctcagagactcagtagcttgtctaaggtagacaaggtggtaggacttcagaaattgacctaggtctattatgctaaaacctccggccttatattttttttaatcagagaaaaaccaattgttatgagaaagcagaatgacacagcagttattttgcatctctttttgttgtaaagagaacgatctttaaactgggaatgttgaaacaaaatattgagagccaagagaagcttggctggtagatcttggtaccctgtccttggactagtgacttcaccccatcacctatctgttacttacaagggggtgaatcagggagctatttggggccaaggttttatgagaaatcaagagatcactatttgcccgtagaagaattcatatctttggttccaaacattatagtagccccatgttatgacataaagagtaggaggaatataggcttgatattgggcatctaaatcccagatctaccagtgattracttactggtcttgctatgcctggtgtgactctgaggccacagaagatgctcacacaatttttattcctttacccctttcaygtgttttattttaccccatcaggaatctttgagaaagcrtgaagatgagaaagatgttggaagactagggagagtagaaagcttttattttaaagtgttgttttttgttttaatgaaaatctagaatgaatgacttgtattgtttgtgaatacttacagaaaaatggcaatgagcaataagagctggggttgagccattcgccagaagaaaagtagcttggtagagcagggggactgtggtgtgcatagtctactcgggtgtttacatctctcccaacatctttgtgaatgaaatggagaagcaagccatagatgaaaatacggaygagacctttaagctgtgcagtttacaacacatttctggaccctataaaatgaaattaaaggaaataagtggcaaaacaaatgaaataatctagactatactttagagcagtgtttcccaaataatattctgtcaaaatctgtatgwtagtaggtattttatcagaaaagaattccaagggtcattatatctgaaaaattccacatctaggttttagagagccatagtgcacatgaacttattaaagactctgagaagttctgtagggaggaaacctgttcaatgtaatctcactcagcatttcctatatgtatttaccatgggaccctgtttagggaagatctcttaatatcttccaggcactagtgttccactaaactcatgctgttttagagttatgaactccaaactatcagtgataacctaggtttggggtcctgagggatggaatggcattggggttaaggatataccatctagagtcaaaccgtttggattcagaacccagttgcacaacctgtgagcttgaagacctcaagaaaagtatttaacttcttagtggctaggtttcctcattctaaaaattaagataagaagtagaagttctagtgaattggggccaaatgattaggagtataccaaaacccttacctgctaacctacaacatcccactgacctcagtagattgttccaactttcaattatttatgcattggtttaaacattttctgtagtgctctatatttttagcctctactagctcatgtccaygccttttaggaaaatactctcctgagagtctttactgtaagtggcttagtaatgggctacaaaatgagaagcaggctcctgggggaagtacactgttcaccttaccacatattctctagggaagggaacaagcaaacaagcagatgtacagagctctgagctccaaggtcatctctgacgtatgtgggtaggttcaaagacagcatcattcaattgatgaagacacagaggctcagactaaacaagcttccaggagctagacacttagagacaaaaactgcttcagaatttaccttccatttttacagtagacagaccttttggaagcaaatgggaaaggcacagtatctattagtcatacccacttttttgtgccctactcctgcctagkggatccactcctccccctcatcagatattcaatgatctcatcagatacccagtgatcatgacctcatcagatattcagagatcaatgacctcatcagatattcaatgatcacagaggttgtggcctattgatagcatatgagttgtgattattgctccatacataaggttgtttttttttgtttgttttktgtgtgtgtgtgtgttttttttttttgagacagaatctcactctatcccccaggctacagtgcattggtacgatctcagcccacctcaacctccacctccctggttcaagagactctcttgcctcagcttcctgagtagctgggattacaggcacctgccactatgcctggctaatttttgtatttttagttgagacggggtttcactatgttggccaggctgttctcgaactcctgacctcaggtgatccacctgccttggcctcccagggtgctgggattacaggcgtgagccaccgtgcccagcccacagggtctttttgacctagaatattttaccaatttggtggtataggaaaagaaacacaaagaaaagacagttcttttctctaaaggcgtgagctgagccagattaagctgcaaccctggctttctcctgcaaggagtctcccctgagttaggcagccccagccacctggaagggagggtgggggaagaaataatctcatgaagtgggaggtgactgaaagaaaaaatgtccaaagaatcacacaggagacatgccaagaggaagcaagagtgagatcccaaaagatggtctttggggtgagaatcccatggaaggtccagcttgaacctctccaagatctcctcctccagactagagtgggggataatcttgagctccctgtagaatttaattgtgctgctcatactttcttgaatatttctggtttcctgtaaatgccagtgggtttaatttccatattgttggtcaactggggcattgctggccctcccagaagaggaaatcagtgaaacatgtaagaagttccatcagtatctccttgcgacttctccaacctttgcaactaccgtatctcaccccaaatactgttgttgccccagacagttcctgtcttgtcccactacagtctagtcttaaaacagctgccagaatgtgtcttttaaaacatgaatcaaatgatacctctcttctgcctaattacctctcatagcttcttatatcactcagagtgaaaaccaaacaaagttcaggtaatggccaaaatggccttccatgatctattcctggtaacttctctgcctggtgtcttcacacccccgcttcctgctcactctgccccagtcacacnggyctccttgttggtctgccctcacattgtgcattctcttactccaggacccttgcactggctgttccctcacgtttttctccctcactgatttcaggttcatgcttaaaggttacctgtttatttttttatgacttcgtggctgcattgtttaaaaatagcacccccatgcacaatggtgtagccagtccctctttcctgcttcatctttctccatggtgctgaccaccatctgaagactgtatattttacttatttaccataactactgtttgtctcctcctttgagaacataaagctccacaagggcagagatttttttttctgcttttcccactgttacactccagcacctagaacagtggttaacacaaaaatggtgcttaactgagtgaattattgaatggtcctgtctatttacctaagaccagtgatttagggcattttttgtaaatgtctttgatgttgtccccagcaacctctgaaataggccaggacataacttcacttaagtttactccaagataacagcacatagtggtccaagaagttctcccttgccagtctattctcatctcaaaagatgcctaggctttccttctttttgaagtgtgctctcaaaaaaaaaattaaaaaaaagagctgagaaaaatttagggtaaaacaaatattgaaggataaaatgacacataaaatgtgatgtgctccatctttcagagaaatgggtatctataccaagttgaggaggcagagtataaggagtacctactgaatatatattaatgaagacaaaaattattaggtgcagacaaaaattgttgggtgcttttgcttttttaaactctcattaagctgccaggtaaaattatctttattttaaacacagaataccaacttcagaatggccaattaatatatccaaaggtagtgagtagcagaaccagaatttgaacccagatagcccacatacttgcaagataccattatctcttgtcartgaataagatagaggaggaggaggagacggggygcccagtatgcagtcaaaagaagatccagaaagacaagccaacttttcaccattatgaactctgtttctatagttttatttacttgtgaccaatccccctttagaaaggctttcttaaaggataggagaagaaagtggtttctggtgaatccttagaaaaattggtgattcatttcaccttgcctatatcttctgtttgaatcctgattagcaaggttttatgctgccatcttttatgcataaattaaatattagacaaatcgtgaaattgtttttgaaaagttcaagcctttattgccttccccgagatgcccacttggagtaatatcaagagtgctttctttatccctcagcaaagatgtggtgagcgtatatgggtcaatttgtaaacctacacaaacctcttgttgaaaagtaaaaattcatttgttaaaagtatgatcctaatcaggcttgtaaattaacttttgaggctctcttagcaatcaaaattattggtttctaaggatccatactagtaaattagaaagacgccaataaggaaattacatgccaaactggagggttattttttaacaaattgactcaaagggaaagaaatgatttaaacaattcagctctatgttcagtgtgtaattaaccagaaacttcactcatataagacttttgccaagtaagtagcagttacataactcccacaccccaccccccatttgtcagcccgggcataattttttaaacattttttaataatcccatacctatatctattataagtatttaccccaatggttatcattataaccatttaacagataaagttaagtttttattataaaagtaataaatgtgtctgggcacagtggctcacgcctgtaatcccggcactttgggaggctgaggcaggcggatcacgaagtcaggagatcaagaccatcctggttaacacggtgaaacctcatctctactaaaaatacagaaaattagccaggcgtggtgacaggtgccagtagtcccagctactcatgaggctgaggcaggagaatggcatgaacctgggaggcggagcttgcagtgagccgagatcacgccactgcactccagcctgggcgacagagcaagactccatctcaaaaaaaaaaaaaaaaaagcaataaatgtttctaggaaacttgaactatgattttaaaaaaagagaaagaaggaaacaaaatcatccctaagcccttcatctagagaccgccactgcactcatgtcttgaagtgcttactgacacgttttttaatacatgttgttgtttttgttactcactttttttttttttttttttttttttttttgagacggagtctcgctctgtcgcccaggctggagtgcagtggcgggatctcggctcactgcaagctccgcctcccgggttcacgccattctcctgcctcagcctcccaagtagctgggactacaggcgcccgccactacgcccggctaattttttgtatttttagtagagacggggtttcaccgttttagctgggatggtctcgatctcctgacctcgtgatccgcccgcctcggcctcccaaagtgctggnnnnnnnnnnnnnnnnnnnncaccacttttatttaccccaatctaccatcttgatttctacccatgtctctcctaaaatcaaacactatgtcctatgtcctttagtgttaattaaggaattgaacatttcttttatttccttttttttttttttttttttttttttttgagacggagtctcgctctgtcgcccaggctggagtgcagtggcgggatctcggctcactgcaagctccgcctcccgggttcacgccattctcctgcctcagcctcccaagtagctgggactacaggcgcccgccactacgcccggctaattttttgtatttttagtagagacggggtttcaccgttttagctgggatggtctcgatctcctgacctcgtgatccgcccgcctcggcctcccaaagtgctgggattacaggcgtgagccaccgcgcccggccgttactcactttttaatgattgcctaatcttccattgtgtaattataccacagtccacttcatcattcctctattatgggagtttagttagcttagaagttttggtgaaatgctatgtgaattttcccataarttaaatctctagcactagaaaaactgagtcataaaacataaattgttttattgttatcctcaaagctgtggaagtggatgcttccaggggtggggtatgagtgatgagcactgtatcctatggtctgcttcccagaacttcttctttgctcccctcccttccaaaactctcccacaaataagcgtgccagaggtgtgtccattctcggttcttggatttgctgtgctctcagctctacataaggcagggattggttatgtctccttttgaagtttcatcttaggtaaatagtaggtggaacctacccattctctttattcctgagccaagaaggatgacattgctctttgctttgtttaacaagtaatctctgtttgccagagaaagcttcagatctatctatatctctctggcattacctcctcactattctctctctccctagtggggkcccctctgtgggtttccctagccacagccctcaggggtgtgttgtctgcagttggagccataaataatggctgcaccgtgagcctgtttgaggttacttattatatttactacacccagaggttttaattatttgtgtttgacataatggtagtaataataatcaaagttgatatttgtggagtgctcactgtatgtatgcctggcaggaaaggcagtgtggttaaaaaactaatgactgaaattagaaaaaaaatgggcctcgctctctagctacttgcggccaagcaccttcatctctgattttatttttttatgtctcccttaaccttttcaaaggattgttgggatggtcacagaaaagaattctatactataaagtgttacttaagtatgaaaaggcatcactacagttcttttgaaccttataccgttaatgatcaaggcaaaagatacacctcttcaactacaagttcagtgaattttaattttttgaaattttagagttatttagttatattttcagatactttctgtccatttaaatattggaataacccctattatgtgtttgtttgttttaataaagtgtatatgatactccttggttttctccaaaataaatagcattactaaggaaatcacatactttctgactaagtagcagatgatttgctgggcatttatgttagaggaccaactaaaataaatgactttgtttttgtaataaccataagagctaaaatatcccatctaaagacactgaaattgagaagctgtagtaaataatcattattttcacatttttatggcatttaatgaaagcagcttcccagctctttgcacgaatgtgggagtgggatgcttccatgcttagcaagtgcttccagcaggaaaacactgactgatgactgcaggttgaaatctttgtgttgggggttcagtgtattttagtagactttgccaagtgttgctgctgaccaacattcattttttagttcatttctgcttcagaaccagtgtaaagagtccaggttttacaagaaaactgtggcataattacagatgagctccagtcccccacagcccattcttggaaagggacaagagagttgtaaataaaactcttgagtcatccagcctaatattttttagaggatgcatttggacaaattatacaacccaccttgtgcttcttatttatgtctggtgattttgcacctagcactcagcagatgccatagtaatccagaggagtccaaggaatttggttctacaattagggacatttgagacatcaagcaaactctgatactcaggcagttattgcctttgagaaagaagttattgccttttttctgataatgcatcacagctacattccttaaaaactctaagactatttatacttgtgatgttccaacattttttgagagcattttaaaaattgttttttcactgaggtgtttaagaatagccaagaataaatgtcagtttgaattatatatatatatatatatatatatatacacacacacacacatatatatgagagttaatatgaaaatataaaaaattattacaaatcagtaaaaaatctctataataagaaaatggtataaactgataattcataaaagaaatgcaaatggccactaaacctaggaaaaatgtttagtgtcatcagcagttaaataaaaaattgaacaatgagttatttgctgttttcatctgtcaagtcaagaatattgaaaatccttaaaggtggtacaggtgagaaacatggatcctctagtgggaagatagaagagatgagtatagactttctggaaggcaatgggacaatatatagagaatctttaaagggtagtttctgattaaacaatttgacccctaggcatttattctgagaaatcagttagacaagtaggcaaaactttatgtatattgctgaccgttatttctagtggcagaaaaacaagaagcaacatacccatcactagggtattggttaaagaatttatgaccacatctgtgctgcggatcatcaggcagccactaaaaatggtctgatgagggtacgaatggctaatgtaaaagcaggaaatatcttattcatccttgcattgtccaagtacctagcctggcccatgatatttgatttaaagacgatattcctcagggagatatgatgtgctctttttttcccgttggattcctgaaattctctttatttagccacatagacaacagagtaatagtcaaatctgagggtggcatggaatatgatggactttttccattttcctacccacaaactcttctcatatccttggataattttgatccttttgaggtgattatagaagacgtcctgaatgtaatatcttcttaccatttccactcccaccaacatagacatagccaccttcacgtcttgtctgcatttcagcaatggcctcttgacaggacttgcttggtctatcttatcccttaaagtttattctcaacatagaaattagactggtccttttaagcctatgagatcatattcttcctctgctcaaaatcttgcaaagatccctatttctttcagaatcaaaaccataattcttaaaatggcctgcaatgaccctgtgattattctgacactgtctcctgttattttccccttgacctcatccactctcatcaacccaccttgtggctgtctcttcaacaggccaggcatgctgccaccttccggccttcacctctctcaactcctttaggactgtacataaatcttgccatcccaatgaggccccatgtgcctgccctatttagtcctgcaatctgccctcaccctgtctcaggaatgcccatttgcttccccctgctctgtgttgcatttttgccttagtctttctcatgataacatgcacaaatgagtttctgtttgttgtttgtatcccctcaacttgaatgtaagctttataaaggaaagcatctttattttgttcactggtggatcccaagccgctagaaggatgattggccactgttgggtgttacaaatgtatatatttattgaataccttgaatggaaagtaattttatatacatatatatatatatatatatatwwwttttttttttttgagacagagtctcgctctgtcrcccaggctggagtgcagtggcgcgatcttggctcactgcaacttccacctccgtggttcaagcaattcccctgtctcagcctcccaagtagctgggattgggattacaggcacacaccaccatgcccagctaattcttttgtgttttcagtagagacagggtttcaccatgttggccagacttgtctccaactcctgacctcaggcaatctgcccacctcggcccctcaaagtgctgggattacaggcgtgagccacagcgccaggcctatataaatatattagtggtaattatattagataatttttactgagcatttactatgtgccaagtggtgcacatgtatcatatcatccaacactcccaatgaacttatgaagcaggtataattaagaccagcaagttacagatggaaaaactgaggaatggaaacatgaaagtacatcgtctcacaagcaataaatttagatattagatataaatcaaataagtctgaccccctattcaagcagaacaatgttgcttctatattatttatttattgtaattccatakaatttcgtttggaaagtgggggtgtttcctatgtaaatatttttggcagccactgtcctaaatattttaaccaaatcaaaatcttatagtggcaattctaggcctttagcagattttcatgtgattaaattgtgacatgtgaactaactgccccacctcctgccacttagtacttggttttaaagaagaaaaagtaaacaacttttgcaaatttaaggacttttttatactcttataaaaataattgtattcttgaactctccattttgttgcgttaggttttcctgttctggttctgcatctttggcctgcgttagttccagtgactgtctcctcaccctccccattctctcttctaggagaatgatgtaaacctgacccacattgaatctagacctyctcrtttaaagaaagatgvgtakraatttttcmcccatttgkataaacgtmgmctgyctgctctgayaaacakcwtcaagatctygaggcrtgacaytggtgmcactgtccatgagctttcacgagataagaagaaagacacaggtaagaattagaggaattttgcaacataagtaactccacactgtcttcataaaataacagcaatatacatatttaacagcatatttaaatatatgtatatttaatatatattgctgttattttgcggaagcaaaattaatatatatgtattggaaataatgccttggaagactgtttgggggattaaatgagtggacataggttggggacctaggcaagtgcctggtatattttagacatatagtgaattttagttatttttccccttcctaaagatagctatttcttttttcttttttttttttactttataagcttttaatttttatttatttttatttttctctctcttttttcttttgacttttattttaaattcagggttatatgtacaggtttgttacacgggtaaattgtgtgtcatgggaatttggtatacagataattttgtcacccaggtaatcagcataatacccaataagtagtatctaattttcaacaaaacccatgaaagcaagcaatgaagaaaggaattcctagtcaataaatactgctgggataactcgaaagccatatgcagaaaattgaaactggaccactgccttttaccatatacaaaaatcaactcaagatgattgaatggatttttgaatctctccactccaaccaaagggatctcttcaagtcctttttgtaacatgccaattccagagctggagacacctggctccttgttactagggctttcattgtcattttccatcttcttatctgtctcttcttctcatacaatctccttgtgggcaggtagactctcttacctatatttatatcctcagagtttagcacactgcttggtacacaggtgctctgcacatatttctgagtgaatgactaatataggagttgtcaaaacttgcattgtcccattatttacgtactgaaatgctactcatcctccggggaggaaaagggtggtagagtatagaaattataagtgtgggcttgaagttgaatagactgtggttcaagtcctacttcttccacatattgagtttgataccctgacaaattgctttaactgccctgacctcaatttttcatagggcttttgtgaggattaaatgaagtcatacataaacagtgcttagaacagtgcctggtgcactgtagggctggacaaatgatagcatgtggttgttattatgattatgattagcctgaaagcaatacagaggaagaaggtgactgctttttagggcctcaagcatattcaaatgaaccattttttaatagactttttattttattttttatttttatttttatttttttagacagaatttcgttcttgttgcccaggctggagtgcaatggtgcgatctcagctcactgcaacctctgcctcctgggttcaggcaattctcctgcctcaacctcttgagtagctgggattacaggcatgccccaccacgcctggctaatttttgtattttccatagagacgggatttcaccatgtttgtcaagctggtctcaaactctcgacctcaggtgaaccacccgcctcagcctcccaaagtgttgggattacaggcatgagccactgtgcctggccttaatagactttttaaaagagcagtattaggtttacagaaaaactgcacagaaagtacagagagttcccaggtctttcatccctacctcagtttcttctattaacatcttgcatttgtgtggtatttttttttagaactgatgagccgatattgatatattatcactaattgaagtccatagtttatattcgggatcatgctttgtattttacagttttattggttttgacaaatgcgtaatgtcatgtatctaccatttcaatgtcatacagaatagtttcattgccctaaaaaatgccctgtgctccagctattcattccttcttctttacagactccttccagcaaccactgctctttttgctagctccatagttttgctttttcaagaatgtcacatagttgaaatcatacagtatgtagccttttcagactggcttcctccatttagcaatacatatttacaaatcctccatgtctttctgtgacttgatagctcatttctttttgttcctgaataatattccatggtcaagatgtaccacagtttgtttattcattcacctattgaaggacatcttggttgcttccaatttttgatgattatgaataaagctgtgaataaacatttatgtgcagtttttttgtgtgaagataagttttcaactgattcaagtaaatacctaagaatgtgrttgctgaggttaacttctttaaaaaattattttttttctactgtaaaatcgagtttctttcaaaaacacttggaaagactttgggtcaagaggagttcaggcaccatagctgaaagaagcatttgaataggcagagatgctttaaaatgagacaagatccaccccgtaaaacaggccactgaaacattttttaaaaggtagctccatggcctttctaggagactcatctctgccttcattctcctgtaggtataaccaaggcaaggaaagcccactccagtgttctggccttgtggagagtggacagccatgcagatgggctcaggtccctggagggcaggcacttggaattcctccctggattagtcctatcctgccttctttccttttcagcctcccaagctgcttccccaatgactgccctcccttgcttttttccggccacctgctctcaacaggagctgcagaccctttggacaaagggcctgccagatcctggggcaattcagcctctggttggagcaggtggaggctgggccagctggggccatgaggaaggaaatcaaagcaattgacaggcagacagccagcccctggaggagccagggaatatatagtaaaccagctggagagccggcagcctgaactggaggctcagaaaggaggttcttagtggggacattgagggggagttaagagtgcagattcaggaagcacggcgaccacactcggtgtgactttgagcaaatcattgacccttgcagtctcccactgtatcaaaggggagtcacaagagcctctgccttataggattggtgaaatcacacaagtgaagcactgggaacagagcagagcatgtttaattaaggacttaaagttattctctattcttaccattatcatcattattattataaacactggcatgagcacaagagcgaccaaaatgcagcctgtacacagctactttttcagagtctggcaactggaaaatgacctgagaggtcatgcagccctacagaccccttcatttttcattgtgaaaacagaggctgtgacttgccttaaggcaaacagtgggttctggggggtcatgcgcaagggtgtgttgagagcagctctgtgccgggcacagtgctaggaaagaaagggtcaawctgcctgttcttaaggagctcacagcctggcaaaggggaagacacacccaggtaagtagaatagagggacaggtgctgtgacaaagacagggttggtgtgattccgcctgttctccactcatgtttagctctgaggatccaggaagtaagaaagtaaaaaagctaatgttttcctttttttgagatggagcctcactctgtcgcccaggctggagtacagtggcacaatctctgctcactgcaacctccgcctctcgggttcaagccattctcctgcctcagcctccccgagtagctgagattacaggcacatgmcaccacgcccggctaatttttatatttttagtagagacggggtttcgccatgttgttcaggctggtctcacactcctgacctcaggtgatccgcccacctcggcctcccaaagtgctgagattacaagtgtgagccacagtgcccggcctaaaaagttaatgttttcacatagaggcatcatgtaataaaagttgggtttattggagcctggaggaagcacagattcaattccctaatggggcttctcgctttcttgctcaaaatgtcaaagttgttgatatttgaagtgggatgacattttccctagggaagaaaaactagctaagaccaaccctttaaaataacatgtgttttgtgacccttatttcttcagatgattggtcacccaatcccatagtggctgcccccacctgaccttaccatacctgtaatgagagagctgatgttgacatgccacgacctggcatctgccaagaaagactctttgggtttctgtggtagtttccgtgaagtggggtctgggccaagaaacaggtttttcttaaggggaacaaccattcctttgcaaagttgccctttctataggactcagtgggagaacagtcagaggaagaaaagcattgtagtagatctgaacctttgattctttctccggacaaaatgccctttttattgtggggctcagatctcagaggcgagtctgacagcaggttcaagtaggagatctgaacccctcaaatcaattaagctaaacyactttccactctagtttttaaaccattcaaaaagccatgtgggtgatagaaaataaaagtttttcagtttcttaattgcgaaagttccccacccaaaacagcttaagagaaggttaattacagcgacatggtaaagaaaccccaaccttctcaaatgcctcctggagaagctgatgtgaatttaataggattttaatccagagagtcttttgaatacttgaggtctattctcctgctaccctctttcctgatgacttcaaatccttcttcaacccaacatgaaagagcattaatatctttcatcgatcaatctactaatccttttacctttccctttgagtcgactgcatgacattacatttagtgggggctagaaaattcctacgtggagagagattgcagccaggagaagcagacagacacaatgtcttgggtagacagaagttaggaacatcaccatttgagaaatatgyttgcagttattttccaagagcagataaatatctgttgggttttgtttaatctatggtgattataagggtcctggtggggaagaaaagtgagttcaaattgccagaacaactactggttctgtggaaagcagaaagacctatctgcctgtctatctatctatctatctatctrtctatctatctatccgtctatctatccatcatctatcatctacacctgtctatctatcatctatctacctatctatctgtccatcaatcatctatcatctatctatctatctatctatctatctatctatctatctatctatgttgtctgggaacacttatgattactgtgagaagacaaaagcaacatcattatagtcattccttccctcttgttgcccctccttgccttcttgagtttcttctgcttcaacattgctgacctgaagaactgtgctgagtaaagctgacatttcagatcaattggggttgaagggaggataggattccttagagggctctgaaaagcccctgggattgtgggcaagatartacatgggtgtgcatgcatawtttttaggagacaagatttttcaaaggggctatggttcccaaagagttaagaatttttagagagaagccgcttagggctggaagggaatccatctggttagagtttttccccactcccaccacctgcacttttctttcctctctcctttcctctgcttggcttttctgtctccaccttcccattgccctcttctcagttctaaaccttctcccgtgcatttcactttgtgcattccatgtgtgcctttcacagctgtagatgtatgtggctctgtgtctgcaggagaccaagtatctgcatgtttgcaaaaacacacaggattggctgtctttttcagtctttacctggatgcttgctggatgcactgatgtagcactaagtcctggcagctggggaggtcactcgtttcagcaaactgcctcactgagacaagcagactccagctgagaggatcagcccattcagggggaggtgacaccaacccaggagtgggaagcagagtcccttcatatccttggtagactgtctgctccctgcagtcagtcacaggcaactctattcattggcaaaggaagatcctgagcaaatgctatttctgcagcccatctagtttgccaggtcacagagcttcaagctcaggaagattacaaaattataaggaggctctcattctaagaggaatccctcagtgatatgccacacccagtgttttccaaattctttcgcattaggttatctcatttaagctttgcaacaaccaactcaggcagctaaagcaaacatagtattattcttgttttcaatattagaaaacaagtcagaaaggtataattaaaaggttgcatggattttccagttcaattcctgggctgtagctgttcggccaagttgctttccctctttaggcctcaattttctcatctgcaaatgaagaaatccaggtaccagtgtggttgtgtggattatatgatataatttgcataaagtgcctagcgtgtagggcccatgcaaaaggttacaagtaaacttacccttaagtctctcataagggtacacaatgaatcttagggttgagcaagtccaaactcccaaaactcctgaagtttgataaacaaaggcaaccgtgaaatgccatttgggtcagtccaaaagattgtgaaaggtagaaaaatttagactgggaatacattttctctgtgtgacaggtgtgttctctcaattgaagaaggaagtaaaaggacatggaatgactaactaaatatcactttgccatcatgctggattgagggagtattgtcgtgatgcactaagggccatgaatttagagtcaagagccaggatttgggtctccattttgtacactactagstaggtttgaattccatctgacacccttccagatggatgaccgcttctccttcatctgtgaaatggagcaaagacccactctcccaattcctgtggctcatggaggggattatgtggagtaccctgtgcataagggtgcttgaaagatcaaattggacttgcttgagttgaataggcccttgatcttagacatccttaagtttcaatagggagagctctctatgatctataaccccagccaataacaggtcacttgtcaccaccagctccgtggacatagacacttagcaggccaataataatatataaagagttggtggcagccaccacctcattgaagccaggcttacctagcagccacggagacaacttcatgtgtgggattgtatgagggtccctgtgaatgatctctcatttccaaatattttttgtgcttaacatcatccacttgactttgtgctagattgcacatggcactggcatatgagatagaaggtcagcttttcatgcagcttttctttctccttcccttctttcttcctcgttccttccctacttccaccatcctctttcctccttgcttccttctttcttctttcccttttttcttctcatcttcctttctcttgtaccattctgacaatactcaaaaccaatagcctctctttttttcatcctcttcgacatttttgtagcatttgatacaaatatcccccaggaattctctctttccttagcatgttatgaattatgtggcccttactttttaaaaaccttgactgttgggattttcttccttctcttastactccttctcaaacagcacagagtcagcgttgccaacttcctctctcattcacatctatctcctaattcagttgatcatttatgctaccgatattgattgagtgcccactcggtgtcagccacatgataggatgcaatagtgaaaaagacagacatggtgcctagacccatgcattttgtaatctagtaggttgtggctacatggcataatacatggcaatgatagagaagatggcatgcctcagtagtcttaggaggtgcaccaaggcactgagcccaggcgtggggtcagttgatgagaagaaggggagcagggccaaataagtgctcctggagtgacataaccaatacatggaggaggctttagatgtcttctgtttgacccaatgttgcttgaccataactagggttgtcagtgacaggtaaccagatctcaatgcaatggtgagctctcagaagacagaattagatatttggggatatgggggccaacctgccaatggataatgtttatgagatacatagtatcttaaaaaggatattgggagggtagttgtaatttaggtgggtggttggaataaatagccctacaggttattttatttattcataattccactcatatctattcactcactccctccgcttattaagcacagtttcactctttacttcatgtgtgagatcccttttattcatctggtttggggattcttatttttccatgtgaacagagagaacagatgctttgtcctaaaatcaccactcctgacttctgaccactgctgtctccaggaggcagagggtaatagctgggcatcatcagccagcctttggctcatcattcttgccaagagcttcctgaagagcattccttctccagaaagaaagtagaagctacttaaaagagaagaataaaaccctcaaaagtcttcctcctgcaggatgttggcatgccatctcttcttcctttgtgggagctgtggagatcagcacacagggactgcttctctggggggctggaggccattgcctaagaggagacawccgggagcctgggaggaggtggtgaaaacagccttctatttcagacccaagaaaccaggatttattgctctctctgagacaggctggaggcaagcctgggtgccttgctggctaacccctggggctggtgaacatcgggtggagggaggggctaagattggactcagcctgcaccttgaactgctgtaaattgaatgggcctcctctgacccactggccaggaagcaggctctggccaggcctggggggtcttttgctcagtggtgctcctgagccagccaccccttggcgtcccggctgagcagttgaccccgacttaatgggaccactacgtgggtgtccagggccagctctccagcgggctgcttcctttggagccaaatcaatatttattaatgatctgcccccaccgggtgcctccgctccacagagggcctctgttgccccagcctgcccaagtcattcattaaccgyggagcccagccgcccgccggagaggctgttaaggggctcacagaggccagcccaccggccgaggtatttggcaaggccattaatgagctaatctgatttaacttttcaaaacggaggcctgggtcgctggggtcagtctctatttccagctttgtgagakagaccgggtagggggaagggacctgcagccttcactaaagaaaataaggggtatgtgaagagaacttaggttaaaaagtgactatccctaaatccagggatgctcaggatggggcagactcaaggctgtcctagggatcttcttcaagcacctttagagccttagtttgtcacgcttcctttccttctcaaggtgggagaaaaggaatctaaaatttaaaagcaccccttcaccaccaccacacctttattctaagcccagcattgctttttggtgaagtgcatcggctgcaaaattgttctttcggctcagctagctcagtgatcttragcaaatcactttgtctctttgagcctatttgctcatcagtgaacagcaataatgtctaccacctgggactgttttgcgaattaaaggagatgatgaaagtaaagcacttagcacagtatctggtgcataataagcgctcaagaaaatgtaactttagaggaaaaagggtagtcctacctttttgcctgggaaaaatcagaagagcccaggtgcagaggttagagacataagcatggactggcttggcctctagtggcctctgggaccactatcttagtcagacaagcaactctggagtttattatgaggctcaggtgcaaggactgatgccacagatgcacctgttttgggtcagtttcttcccaccccaaagaaggaggcaggcaagtgctcagcaccttgcccatttcacagatgcaaagccagagacgcaggaattaagtagtttgctcagacttccatgttgtgtgggtgggaaagatgagacttgaactcagacctgctggcttcaaacccaggatgtgcacaccctttgcacaatgtaaagagtcagcacatgtgtcaaggctcggcactgagtttgtctggggtcctctgtggtctctcctgaggtcctcacattgcctgcttcacaactctgcaagctgggaagtgagccacatcagggatcgacccccagtccccaacacccagcacccaggtgcctctccctggtcttgttcctcaggctttgtccctgctctccaacatgacagctggtgaatttctcttaatggttaggtctgacctgggtcctcatcctaccctagaagacaaataggctgcacccaagggcattaactttatgtaagggaatagatcaaatgtggagctgggctgctgcctggaggaagtgagcaccagagcttctcaccctttctcacttgtccttctataatgataataccactatcagatacttagaagcacttgtgtgccagacaccattctaagaactcttcatacatgagttcattttaatcctcccatcmaccctctgaaggmcgtactattagtatagctattttgtaaatgggaaactagggaacagagggcttaagtaatttgcacaaagttccaaagtagagattggagctaggtggtctggctccaaagtgtgtatgatgagtccccaggctttgccacttctctggcctggctgtgttttggaccttttcttgaagatgatggggtcctgaagccaccaaaggcccctggactcaggtgagcaccctgcagcctcgcagtgctacctcggggtccctcacagcctctgygacaaggtgcagagctcagaggtctgggatgtggtgagctgttttgatctttgtcttctttttacaaagacttgaatcctctgagtcttggcaactttctcaagttcttcaaattttttgttttcgttttgttttattttgtcttgtttctcctaccaagagggctgaatgaagccaggtggcccrataagaattttcctctggagaaggaaaaagtcacccagagctagaaatatgctggttctgctgccctctggcgttcrctgagcgccagccagcctgcacagccctgagtcaaggtggtgcaccctgactgaggtctgtggggaagaatgttgtttctctggtgggaggagaaaggaaaatgaggctgtgcatttgggagctgaacaaatgtagtgactgtacttctgaaaaataaatgaggttgacacattgattgaagtggagctgacttttcaagtatcatctggccagcctcagcccttcagaggatcccacaggtctctgaatatgaaactcaaaagggtttgctgcgccgataaatctaatacccacatgttacagaaactaaagcccaagattagaaacctcttaatacccaagctggacagagaaccagcttcctgatcccaatctctgttctttcctcctccctcctcctcttcttcctcctcctcctcctttaatcatcatcattaaaatctttgtcatattaatggttaacattgataaaacacatattatgggccactgtgctaagatgtgtcatattgctgcagcatttaattcatccaataatacggaaagagcattttaattcattttgtgaataaggaaactaaggctccaggagataagacacttgccagttwcacaacgaaataagtggtagagactttctaggcttgctggaaaactttccactctgctctctgctatgataagctaaggatacagtagaaaaaaattwtatatatatatatatatatatatatatatagtgtatatatatgcatatatatacagatatatatagtatgtgtgtatacgtgtatgtgtatatatacatacacacatatgtaactcacagctgagcagtaatactgtctactatgtgccagtattgttttccataaatcacgcatatyaactcatttaacatcatgttgttcttataaagcaatactttctagtactactattatcaccatttcaaagataggaagagtgaggcacaaagagatgtaataacttttcctgggctcatagatagtaaatgcagagataagattcaaacctgggctgtctggctgttttaagactcttaaccattgctggactgactattcatgacacaaataggaaaccaactctggactagggccagatcctgagtatcccagatttcattgagccatgccaaggcaatttcaagtcaccagggtcttccctctggggtctagaggcagaggatttcatagtaaatagcatgttgtctttaacatcaaaaggacaagagrtaagagttggcaaggatgyggagaagagrgaacccttgtactctgctggtggggatgtcagttggcacagccattatggaaaacagcatgaaagtttctcaaacaattaaaatatagctaccatactttccagaaatctcatgtctgagtatatactcaaaggaaatgaaatcagtatgtcaaagagatatctgcaccccctgttcattgcagtattattcacaacagccaagggaaacaacctacatatctatcaacaggtggatgaatgaagaaaatgcgataccctcctgacacacacacaatggaatattattcagccatgaaaaaagaaatattgtcatttgggagaacatgggtgaaccctaagagcattatgccaagtgaaataagccagacacagaaagacaaatactgcttgatctcacttatatccaattcaaaatgtgttgaatttatagaagcagagagtagaatggtggttgccagggggtagggtgatgagagaaattgggagatggtcaagggtacaaagtttcagtcataagatgagcaagtactggggggtcaaatgtactgcatggtgactattgttaatcacactttactgtgtacttgaaatttgctcagagagatctcaagtgtccttgtcccactccatacccrcacaggaaaaatgactacatgagatgatgaatatgttcattaacttgatcatggtaaccatgatgtatgcatttattaaataattacattgtatttataattttataatataaatatatatgtgttatataaaatatatgcaataggtcaggtgcagtgacttacacctgtaatcccagaactttgggaggccgaggtgggcagatcatgaggtcaggagttcgagaccagcctggccaacatggcgaaatcctgtctctactaaaagtacaaaaattagccragtgtggtggcacgcacctgtattcccagctacttgggaggctgaggcaggaaaattgcttgaacccgggaggcgtaggttgcagtgagccgagacaacaacactgcactccagcctgggtgatagagcaagactctgtctcaaataaataaattaaattaataartaataaaatatatgcaatatatacaaatataattatgtawatataaattatacaattttatgcaattgtaattttatattataaatatatatgcattttttattgttcaattataccccaataaagatggaattttttaaaaasaatttaaaaaagagcatccccatcactttccatttccttatgcttctttattcttcttcttcaagaatttcctgacattgtcatgtatttacatttatttattgcttatctcgtgttgtccctgccagaatgtaagcaccactaggatggtgactcccttgtatgcaccccacaatgctttgtgcttggtacgcaggaggtgctcagtacatatttgtggaatctcctttggtcattctaaatgtcccctaagtaagaaggggttgcagcaagaaaggacttgttctgccttatttctgggggcagcagttactgccagaattatgaacgattcccaggcaaaagagagatgatgaatgagtggaggcaggctacctccgcagtgtggggatgagattatccatggtcctgaacatagaggaaagagtcaggcccccttgtccaggtgggtgccattcattgaaaccccttggtggcaatgtcctggagaagcaagaaagatcttttagaagatgctgagccctgggtgactctaaagtgctgattcctttctcaagcscatgcaaacctgggtgggaaacaactcccattcttggcactgacaacagaggttcagtgtacaacgcaaatgctggacccactgaggaaggagagcttggggaggagtgtaggtgacaaggcgggaagccacgttcctcaccaaatgaacagagcatggtattgagtcatccgagactccaaagtttcagcagttgggaccaaggaggtctatcaagagacttgccctcattgttcctcagtttcttcatctgtaaaacgggataataataatacctacctcaaaggactgttgcagaaattgaagggggtagcatatgtgaaatgtttagggcagtgtccaacacacagcaagtacgacagaagtgttacctggagtgatggctgcagcatctgcctctgttcttgctgtccatagggagccaatctggaaaagagggctgtgctttaggggcatggaaacttctgggcaggaaatctggcttcacagtcagccctccttatcagtatgctctgccaccttcccatgattggcaagatgcattgacgatcaagaccagaggccagagagtcagctggacctgcatttgaatcctgactccactgtttcttagcagtgtgtgtttgagtttgcactaaacctctctgtacctcagtgtcctcgtctttaaaatgggaacattaatagtaccccccccccacaggtaaaatatttagaacaccattcagtgttagttttattgctaacatgggtggtagagagcctaggttccycagctctgcagaaacaagggtctaaatggacctttatgaactgctggaatcagctctccttgttttgctggaatgcagctgctgctcctcctgaggctcctgtttagatcacggasggaatttccccagattggccactagatagcacacatgctctttcctgccccatctaagcaggtcagaatcatgaatcatgggtgtcagattgaaagtcacgttttatgtaccagacgctgagcggcgccctttgcttgtttctcatcactgcccacagcaatcctcagattcaagtagctactccaccagaaatgctccaccagaagtgcctggcacgtaggaaggcttcaaaaacacgtttgctgttcttcctatagttgtgtatcccagttgtttattcctcctcctcccggaggaggaactgagacacagagaggataagtaggcagatggaacccggattctaagccagaccgcatgctgattggaagttcagcatcttcccctcgacctcatttcaggggaagttctggaagccttgcactcacttcagggttcccaccacgtctattttggctctctggattctttttgaatctaccactttcttactcctggtgtgatctyaaatcagctatttaagcttttagagccccagtttcttacccgcgcaagaggggttatcatgccttccttattttgaaggtacgtcagaaatagcaactgtaccaaagcaggcactctggatggtggttactgctgtcaataccttaaatgttaacacaaccagggtgaatccattacttcccttctttcttccctccttttctttcttccttccttccttatcttgttttctccctcctttctttccttttcttccctccctctcttccctcttccttccctccttctttttctctttatgcccggtacaacaaagtacccatggtttctgccctcatgaaacttacggtccaaaatgcccttgtctctgttcattcctgggaaaatttcacctgcaatgtatcttgtttcctgtaacccacagggatgtcggtgctgccacctgcccttctccctgggcccctctctctgcaagacccaggtgttgtagtccaccccactcaagcccaaccccttccccactacactggctcagaagcaagtctgaaatcctttaggtgctgcaaggcatcttcagatcccaactatctgactctgttcactctgcttcaacaacggctttctaactggctttgcgatcgaaagattttgctgcagtgcctggggcctttgggagggaaacacataatgggaagatgggttctcatgagctcatttacagtagaacagtctggttttatataatttatattttgggcctatatgtaatattctgctgctaatggccggacgcagtggctcatgcctgtaatcccagcactttgggaggccaagggggtgggtcacctgaggtcaaaagtttgagaccagcctggtcaacatggtagaactctgcctctacctaaactacaaaaattrggcaggcatgatggcgtgcayctgtaatcccagctactcgggaggctgaggcaggagagtcacttgaacccaggaggcagaggtttcagtgagccaagatcacatgcaactgtactccagcctgggtgacagaagggaaaaaaattctgctgctaaagaaaaccatcaaagaaaactaccatgacgggtgggagggagatgagttttgagataattcagagaacatctccaggaaagagaatgtatttgggaatgggttttaaaaccggtttctaaggaaaatggagtttaacttttgaacgatagtaatttgggggttatctggaagccagcccacttgccatcaccattggctgggatccccacttctgatctcagcaaggcctttggccatgttctgccaatctgtactcaggaygttgccttctctgtgtttcagtgccctggttcccaagaaccattcaagagctggacagatttgycaatcagattctcagytatggagcggaactggatgctgaccaccctgtgagtccatggcccgtaggatgagrttttttcagtgcctctcctcyactcccctcccttcctcttaccttctctacttggagcaatgtacttgttcacttgttcaacaaacacttattgtgttcctatttacacgagggctgggaaaaattagcaagactttattgtcatcatcattatcatggtcattatttttgtaggagcaaatataaatcactgtccagaaactattgtctctatatactaggtctgtgtatgcacaaacacacacacagatgcaaatcatcattgtttctgcctgtgtacatctatggaggtttaagtcaagtgcttggtaaacagcaacctgtactaacaactctgccaactgcagggggcagcggggagtggcgaygttgaaactgaatcttaaaaactgagtaggagatgcgggtcagataaggaacggagagggcttatggctgaaagaacagtgtatgagaataccgagagtcttggaagcatccacaatactgtgggaatgactggttggtgcattaagtatgagaatgagagatgtggctggggcagtgggttgggatcagattgtaaaagggctaatggaccagaaagaggaacacggactgggcctgtgtcttgcagccatgggggcaggtcctttaatggtttttgagtagagggccggggtgggggatatttcatcgttccctctactctgrggcagagggtctggggaggaacagcccaggctgcggtggctcagggccaggtctcacagcctcyatcggtgggaagggccaccgtcctgttgcctgccctttattctctgccaggcaaatgactccttcatctttaaatgacttgcagccatttacatcggtgaaggttgagcagaacgcagaggaagcatttacacttccacaggagtctgttttctcctcacatttatgtgggtctttataatcagcaaagaatgttcgcaaaggcgcttttcaggaggcaaagcagatgcttccatcttacagaactagtgaggcccgaggagcctgatgacttttctaaggcccggtgctaaactgtgagtcctgagagctcatggtgcctgaagacaaaggcctagctagtggcagaaatccaggctcttttacagaggccaaaggcaagctatttcaggggcaagctggccttttgaaatatgaatgaytgatgcttcttctaattcaaattgtaaaaccaattatagtgggcttgaaaacacagaggggcatgaggaggaagatgaaaagcaaccataatttcagttatttctatttttctctctggacagttctgcatttttcaaataatgagaaagcatatatcaacagaaacaaaggtgaatttcctccaatctcccagacttccaaacagaaaaaaaaaaatcacctattatcacactattctaaaataatcaataaatcaatattaatatttgggtgtgcctccatccttcctcctttctcgctctctctgtctatatatatatgtatatatatatawggtgtatatatatgcacacaaatatgtgtgtgtgtgtttgtgtgtattaactgtcacaacttactaaccagcacccaattgcaaacgtgtaggaagtttgagtctcacctatgtattttcacgtgaacttccaatggctgccttgaatattagttgtgaaattaaactaagttatatttaaactgaggataggaattaaatttaaagctcctagtgtatattacttaaatactctctctccccgaaaagtaaaggtaaatgtggggacttttgacccccattccatccyatataccatgtagcctactcccaggagccctggggcrccaaggttgctccaggtgggattctgctctgtgtacccgttcaacagatctctgtctggggcctcttagccatcaactctgtcagcaaagcatctccaaagatactggttctcagaaaagctgtctgttcacctctgacccatccaaggggtctgcccagcagggcgttattctcctcttaccaaactcctgtcttcctgccccaaaccggcattcttcccattcgtttcactcccttttcatttgggacagtggaagactccaatgcaaagagatggacatttttctccctgtatcctcaagtcccctccaaagcagctggcactggctttaaaactctctggaatgcattggtttttaaaagccacatctttgactccctgccctctcaatgttatgaattttattgtaaaaatacaacatatcaggtacacagttccctgaagacgaggcgccaggctctctctgttcctttcatttctcatcagatcccagggacgtgggccaaggacaaaacaaaccctccagcgtgctttcccagagaccccggggcccacaggcctggcctcagtgtgtgagtgcaaacagacaccagcacaaggagtggtgcagtcagcgggtgttcttctcgaaaggaccctctgttctctctgtcccgttgcatcctgtgtgatctctttgtccctgaacccrgcccttggcagtatgcatggatgtgtgacccaatatctctcatcaggtcctccaaagcagtcactttgaaaaatgaagtaaaggaaggactgtttccaagacagagggaaaatggcctctgcctttcagttttagctaagtgggaaaatgaaatagggaagctagatttcctggtgaccatcttgcctcctttccccttctttcccagtctccttcctttcctttcccctttcccaccttgctttctttttttccaaaatcttttagttaactaatgatattaggagctaatgcttcttgagcaggggctgtgtgccaggcacaatgctaaatgcttggcattccttttttaatttgaatattatcaccaccgtatgagggctgtacatctcattttcagataagaaatctcagagggagagggccgtgtaacatcatctgtgtgtgaactatgtctcaggccatataaaagaaaggaggttgaagtgacagatgacatgatccctgccctccaggggcctgtggttgtacagtagagagagaaggggtgttgactgttctcaaagcagtgcaggagggagctggaatagtaactgcaaacttggcaggcagaatccaactggttctatttaatttccatttccaaaatttactcccctttctgtccatgttgttccctttacctgacatgttttttcttgccaacccacctgttatttccccacttggaaacctctattcatctaaggtctaaatcatatatgttgcctccctaaagccttcctcctgtctcttccaagacttaagtttctcacactgttactatctcagagatggcaacaatcacattgtgtttatactttgggtacagagtatcagatcacaataagtttacttcttcatgacttataacctyatgggaggcacaagatatatatatgcaagtgaaagggccatatgcatgtttccgaaactgtagtttatgaaaaatatcccatgatcaaagagagaaactctgtattctataaccctactttaagtatgcaaattccattatctcattagaaactttggaaaatcctgcaaaaatgaaacccagtcaatgcaatgtttcctaaaacttacttacccacggaactctttttaatgaaatacctagcaacattatcttatcgtgagtggtagttttccatggaatacagttgggataataactagtatataattatataataataactcaaaaaagtgcataaatgccaggtttcatgagtcagatagcatgtgctatcatttctaaggtcactgtgtactggaatggttagggaggacttctagaaagaggaagatctgagtctagccctctagcaaccagagcaggctaactgctcagcaaaaacccccagatctccgtggccaacccaataaaagttcacttccaatgtgggtcagtaaggaaactgctccacaaagtctttcagaaccaagcctccttccaccaatggctgtaccctccttcaactccttggagcccactcattctgccagtggatgggagaagagagagtgagaattgcttctgggaagttttcatgggccatgtctggagatgactcacatcccttcaatcaaattccattgagtagagctcagtcacgtgcccactactaactgcaaagaagatgggggaaaatagtttagcaacgttctctgaacaaaggagagaggacagatcttggggagcaccagcaacctctgccacatagacccccaactccagagctacctattccagtttacctggcagctgcactggagtctaggctacagatctacaatagagggggcttcttagtgaagaaaatatcagccaacacaactgtccttctgtggatatttctacttcttgacccaagtctttgaaactacatggttttttttaatggagtttcactcttgctgcccaggctggagtacaatggtgcaatctcagctcactgcaacctccacctcctgggttcaagtgattctcctgcctcagcctcccacatagctgggattacaggtgtgtgccaccacacccagctaatttttgtatttttagtagagatggggtttcgtcatgttggccaagctggtctcaaactcctgatctcaggtgatccgctcgcctcagcctcccaaaatgctgggattatgggcatgagccaccacaccaggcctgaaactgtttttaacctttcaaggtgtgggcatcaagttttcctgctctcctgtaggaaatttcttcttcagcaaattgcccaataacaagactatatttttcaatacttttctccttttctcttccttttgcccacctaattttctccacctgaggccctgtcagagttccttctaagagtcagtcagctagttgagtcatcaaagacttgttgcattcttactaaattgctctatccaagcataatttgtgaaaagttaaaaacataactgtcatgcaggtatatagtgaacacctgtcaaagatccatttaactcactattgagggaaccagcaagatgacaaagatagtgcagaaaagatacaagagacgaaagtacacgtggtcatcggaaaatagaaagccagaataaggtcacaaagatggatgcacaagtgattaatgttccataagacaataaagccataattatgtgtcttaacctttctactaggcagaaacaacttacaatttgataataaaatgaatattttgcaacttattggtcttctaaaaagccagyatctactttgaartgattgtaactttataagtagtaaatatatgtccccttagagcacagagtgagcttgtgagacaatgatctcatatgacatttaaaaggcacacagtaatttttttgccctaggttttgcaaatatatatatatatatatatatatttttttttttttttgaggcagagttttgctcttgtcacccaggctggagtgcaatggcacgatctcagctcactgcaacctctgcctcccaggttcaagcagttctcctgcctcagcctcccgagtagctgggattacaggcatgcgccaccacgcctgactaattttgtatttttagcagagacaggatttcactatgtgggccaggctggtcttgaactcctgacctcaggcgatctgcccaccttggactcccaaagtgctgggattacaggcatgagccactgcacctggcctgttttgcataatttttgaacagcttctacttggggatatgctgagtgtgctatgccctgaaaatccagtgatatgtaaaagagtttcctgagtttaatcattattaacatatgtgagaccatctgaaamgagaaacatacaacacactgagagaaaccaataaactttggaaaaatccaggaagacagaaagaacagatagtgacttattggtctaaacgagtggggaagagggtcccactcagagggtagaacacgtgtgaaggccttgatgtgggaaagagcatggtgtgtttaaggaattaaagcaagaccagtgcactctgcagcatcataggaaggccagagtgagtcagcacagggctggacacatagacagagctggatcatgtaaagccttgtggactgtgctaaatattttggacaatagtctaatagcaatgagaagcccttgaagggcttttgaagaggcaagtggcctcaccagacttgcactttataaatataatttgggmtgaagtggagggggtgagaggccacttacccagcagctacaatagtcaggcaagaaatggtggtggtcgaatgcaggtgcagcagtgagaatgaagtaggaaggacagactcagatgtttgaatggtagaatgggcagaaattgattgctggatgtgaaggaagagagaagggggaagtaaaacaataactcctggcttatgggcttgggcaactaggtacatacatttttccagaatmggcttcttggccaattgtagggtgagcaaagggattgggcatggtcggtgctcccctagtctactgtttgcaagtcctccttgaccaatgtctataggatgggaatggcagctacttaataaatgccagtttgaaccttttgtcttctgtgttccatccttcccccagttgtcatgaaacattatgaaaaatgcaaaaagcctcttgttattggcctagctgaaatatacacagcaaggtaagaattctgtagatgttggtttaaaagccccttgtggctggtggggatcactgacccattccagagtacatcttttttatattctgagccagacttctctgtctttggatttcctgccattttgcacaaatgcatcatgctttgagcaactacaatgtgctcagaattttgcttaatgtgctgccgacattacctgacttaaactgtacaacactgtgaagcaggtaggattgacagtcttattttactgatgaggaaactaaggctctgagagataaactggccactcccaggccatgctcctwgtgaataaatgaattagtattccaacacagcttttctgactttaaaacctgtgttctcactagcctaaagagagcacttctgaggtttaaccttagctatgatattaggaaatgatggaataaatatctcagtctacaagaatactcaagacttttccatatatgtagttaccctctcccctaaacccacccacacacacaaattatacctctcaatacatgcagacttcagttgatgtcatgacttgcatcctgtagaactctctcgactttctcccgtcttctatcccctcccctccccctcaccactccttcaccaacaatatattttcctgtcaaaacatacttggttacatgcagtgcaactaaaattgctgctattagtttaattgagacagggtgattataaataaattacatgcagtgctactgaaattgctgctattagtctaaattgagacagggtgatcagtcatcaccaactgtgatttgattcagaatgtactccacatggacrgctacagaggccctgtggtyrtctrgtagcccaaggaatgcaaggccagatccccaagaggctgggcgtcaggccacagagctctctgaccactggtaactgagaaagcaaaactccctgcaacctggttggttggggccccttgcaggctgataatgaacttagaaaccaggagctggaaagggtcatggttagaaaccttcccacatggaagatctgtatagtgcattatctgtgtgtgtgttcctgtataccaatgtgtgaatctcctgctacttcactaaaatgatttgagatggatatttaatactattttcttttttttattctaaaagaaacccgttctcacattagaaaacttgaaaagcataaatagttttcaagaatacaactgttagtgttacttatttttcccactacctggaggtaacacttgttagagtttggtgtatttctktaatcattttatttatatacttacatatttcctctgacataattgatatatgacataattgacataattgataatatcaactgggtatacagtattacattagcttttattttcacaagtagaaaatctttaaaccacctaggcaaggtacatgaaagataaacaataaaggcaaatgggggtaagaactgttcatggatatctcattcctagaagcagcatgatgaagtggaaatccacrgattgaaggaattctcttttcttcctggattcctacttcagtgctcaaatctcaacttgccagcctagggaggaccacaaaatccaaatggaggtgctagttctgtagttttgggcctttaggcaaatggctccatgggcttcatattcttcaagtctagaccaaaatatagaaatggacctttctacaaggtgccttacagggtcaaaagtctacatattatccttagggcctggagaaaaactattcactactaactattaaataagaatggcaagtgagaatgactgtaacaatcaaaccttaatgactgaccaatattacatgtttattttgagccccaagtatggagatatggacaaataartgttctttgtttagtccagtagacaggtttctaaaatggtgtgttactgatatttggaaagtaaatcatggtgcccagttttatttttttttttaaccacatcatctcaaaccaacttaccttcacccagtagaaacgaggcacaacagtagttttaagtactcagattcctaagctttctaatctgtaattaacgattaaaaaccattcagtgctctagggaaaggaagagttatactttgcaataacygtgtcataaaatcttttctaaacagagtaatcacattatttatctgggatttagatttggagtaaaaaaaaatgtgtagtagttttacttcacttttcaagtgtgaaacatttggatgtttctatttttcaaaatatattcccggaaataaactaattaactcctatcttccctcccttcctttcttccaacaagtgtctgtagttttttcctgtgtgccagaatcaatgccgcagattctcagaacaaattacattatattacattgccctctgtgtctttacaattactggtaggccctgatatatatatatatatwyacacmtatatgtatatatatgtgtatatatatacgtatatataggtgtatatacatgtatatatgtatatatgtatatacatatatacatgtaatatacatctatatatacacgtawatatacatctatatatgtatatacatgtatatatacatctatatatgtatatacatgtatatatacatctatatatgtatatacatgtatatatacatctatatatgtatatacatgtatatatacatctatatatgtatatacatagagagagagrgggggagagagagagagagagaaagagagagagagaaaactctcccaaaacaaaaattcaaccaatcaagcaaccaaaacaaaaaacaaatctaaaaatcagggaatatttctctttttaaaagtctcctttaaacattacactctgtgacataagcttttgttttgaattcactactgccttggtttggagggacagtggagcagagaaattgtgagctaaagtggtggatggcatggcttactgggaaaggcttggaagaaccacagcagagttctacggaaatgatatcagtctcttgtcttaccaaaatttagactgcaatcaactgtttttggaaaattgtctttcaatcagttggaatcccatttccaccccaaacactcaaagacacacttagcctcctttcactcggaaatgtgctgcttacaaatcactgggaaaaggctgcctgtgaatcagcttcagaggagactccattatcatcctttttaggtcctgagacagactctcagttagctaggcccctgccagattgtaaaggctgacaattactgatggtgatccaaatcccagcctcaccgtcactatggatccacttctctgaaccaccatttattccggaaagaacaggataatcatactcatcgaactcrcaagtttgttgtgagaattatatgtaaaatcagttcctagtactcacaaactggcacatagtatgtatttaatcaatggtatttttaaaaattgcaagagcaataagcatgtgcctgctcgtctatcaagaaattaaaaggtrgagctagacacaaaccttaatcaggaattaaatggatattgtacatcttcatcatagacatccatcctrtgaactttgcttagtttagcaagtgtgtcagtcagatatgctgtagatgaggtttctttaagaacagatcatgcacattggaatcyacagcaaggaggctcatgctaaatcaaagnagttactaataaggtgtcactcacantatctggtaggagagctaagtttaaccgagactttagttttagggtataaccaagggaaggagacatgcactgtcatggcttgagagcccccattcaaagcattcataaaggtaccagacctcttcctatgaagccttgaaaaatcaggtgtctcttttctcctagggttttaaagatcctgtgtaccgtgcaagacggaagcagtttgctgacattgcctacaactaccgccagtaagtctgccttgcttgttgaggggaagagagaaaaacacacccctagcctgcttctcccttgccctcatccagttgaggatggaaaataccagcatgamgagtcctgccttctgtgtgtgcatgtgttcatgtgcatgcgtgtatgtgtgtgtgggggtgtgtttaaaccctccctttaataacacatgataaaaaatgattgctgctagacaaaacaaaattacccactgtgcgggggccctgctctctcccaagctttgttgtctaattacgcagtggtgtctgcagtaattagaaaaggcctcggtcctgaataaaacagcctccggtcttctctacattaaacagggaagaaggaaaaagagaatcatttacattcaagaaggagctggctgctttactgaaataatgaatcattcaagatttcaggccagccaaacttcagctttctacttttatctggtctgacccagctgtgaaggacaattttaggatggttttttttttttcctgtctgsggttctgtgttcctcccctaccctattttagccaaaagaaaatgcaaatataaaacatgtttgagaagacaacagctttgctcctttgagtcttaaggaactacagaaatgccaccatgggaaacttagtgttttgacaagtgctgttactgagttaagggattaagaaaagacatgcacaagaagaaacttaaaatttgtccagaatgctcatggcatagtactttgacagctttgatagaatctcagggagatggagaagatgatgggcctttctatactgaatacaaagttactttcaacatggaaaaacctccggaaaaagagagagaaagcttttctgaatgacttttggtagtggaagaattcaaaaatgtgctgtctttagtcagatctaagcccatctgggccttggatcctgctgagcaggattcacagaagatggtgacctccctttcctgactccacctttgccccagctcagtcaggtggacaccatcaaagcaggtacaggcaaaagtccttcagatagtcagcaataacagatcatacttattatcttcttgctgtgtgyctgggggctttggtgaatgctttgtatatatcattttgtttagcctcaataataacttctcatttttctgatggggtaatcaaagcttacaaaggttaagtaagttgccaacatcatgtagctagtatgtgacataatcaggttttaaactcaggtttgttgaattctaagggtatttttagccactcttctgagtgtctggggactcctagagtctagagactgcacttcatataatcaaggaggaggtgcttagaaagtacattcacttacttctgggttgctgggatttggggagagcggagacagatcctcctcaacctccttctcatagaaatgtgaaaccttatgaagamgagtgaaattggtgaatcacctcacaatcctggatgttaatcagttaacttggttactgaaaatcatctatagatagctggactctcagaagtacgttaaaattttttagtcaatttctcaccttttatagatgaatcccacatgattaactaactgatgtgccgaaggtcatgtagctagtaaagggctcgcctttttaaaaaattaaaagcctatttcagacttgactttatctcatctcatttaagctttcggtgctctttttaccatgtctttcttcttcaaaatagtctcttacttcagggtctgatatagttcatccttgttttttttttttttttgcagattctattttgcgaatttgcctacttgcttaagtgtatttgtgaccccaaaatcgatactcactgtacactttcacagtcattcccagactagcacagagaggagaaaaaatttgattctactgaggtgtatatctccaactgaggtcaaagaaggcaacactctacctttctgtttctaccctcattttgtcaacatgtgtcctttacatggtctgtttagtgtcacatttttaacatttttgtgctttcgtttgtgattttgctttttaaaaattgaccaaggtctcactcagttaggaagcggcagggttagaattgagattctcctgcttttcccaggaaagcagtaaactgctgagccactgctatcaagcttgggatgagcagccccaataactgcataaaggggatactgcggtcactgctttagacttcaggggctggtgcgaatcagattaacctgcagaaaagcagaatcagaatctcaaatagttatgttcaagctaaatggaagactccagagtgaagcaccgaggcctcatctcctcaggttttcatttagatgtcaccttctcagccatgccctctctacaccctatgtaaaattgaaaccccactctgaaactccctatacctttgccccttttttctctatagcatttgtcatcatctaacggagttgtgttggctttctgtctgccyctactagaaatgtggactccatgagggcaggggtaattgactgttttgtcacagtgctcaattaacatttgttgaatgaatgaatgaatccaagagaccatataaaagtaaagattcaaaatggtgaattggaggcagagccaggaattgtgtctagaatcatctagaaggctgctacagcaggttttgatgatattactggagtggaagttgggcttttaagttttatctaggaatagataaaacggatcataggagcttatatttttcatctgcaaaacaactcaaacataaaggagagctctactggatactataaatgaagagtttaaggcgggtagtttaggctcaggcaggtccaggattcagcatctcattatttgcctctctgactctagtgtcctttgctttggccttgctttcagacattggcctcatttctcttggagagggaatctagcacctctaggctgatacgccaactcaattagaggtcctgtctatttccaacaaagtcaaccacagttctggcattgagtccactgactctgattaggacatagtcccrtctctcagccaggcacaatgcaggagaatgagggatttcaattggcttagtctggtcacatgcccacttctgaaggtaggagtggagtctctcctcacctgaacctcacagactgagaggggagaaaggtgctttactgatgaatggggaacagatgttgagtccctagaacagcaggtgtcaaccagcagaacatcttggtgctcaggatgttaccatttcttgaaatttgttgcaggaataacagatgcctttcttttaaaatgagaatcagtcataatggtaatgatcaattatccaattgttaggatttgtcagtactaatactaggtactttatacatagtattagacttaaatttatccacaccatacaggtacttatgtttagcccacgtagcagctgcacagattgaggctcagagaggtttactaaattgcctgagctgatacagctagggaatggcagggccaaggattgaacagtctctgtctgtttccaaagtctgtttgtctcctgtatcagtgcttagtctcgataatggcgcgttcttgggcaagagcttacctgattttttttttttcaccatcattgctggctaccacaagaccttctgaacttgcctggctttcaataatacttaagcaaaatgctatctttttgcctaatccctgtcactcgtctgtagacaataacaaagactgtgctctaatgtgtttggatgaggtacaattctgaaagggcaagaaagacctaatctggagcctaatgatgatccataattctgagatcaacagtctcactttgtcccagactctgtgttcctgttagagaaataggcctgcagcctaggggacagtcactgatctttgaagtcaggctttatttggtttacatctgtttgtgctgttccgaacacagttcattcccaggtggttttcaaaaggacttttttttwaaaatctttaatttagctttcattttaagttcaagggtacatgggcaggtatttacatataggtaaacttgtgtcatgggggtttgttttacagactatttcatcactcaggtattaagcctagcacccattagttatttttcctgatcctctccctcctcccaccctccacccttcawtagactcagtgtgtgttgttcccctctatgtgtctgtatgttctcaccatttagctcccacttacaagtgagaacatgtggtctttggttttctcttccattagtttgctaaggataatggcctccagctccatccatgttcctgcaaaggacatgatgtcattttttatggccrcatagtattccatggtgtatatgtacaacattttctttatccagtccaccactgatgggcaatgaagttgattccatgtctgtgctatcgtgaatagtgctgcagtgaacatatgcgtgtatgtgtctttatgatagaatgatttatattcctttgggtatgtacctcataataggattgctgggtcaaatggtatttctgtttttaggtctttgaggaattgccacagtctttcttttttttttttttttatactttaagttctagggtacatgtgcacaacgtgcaggtttgttacatatgtatacatgtgccatgttggtgtgctgcacccattaacttgtcaggtatatctcctaatgctatccmtccccyttcccccgaccccacaacaggcccgtgtgtgatgttccccttcctgtgtccaagtgttctcattgttcaattcccacctatgagtgagaacatgcagtgtttggttttctgtccctgcgatagtttgctgagaatgatggtttccagtttcacccatgtccctataaaggacatgaactcatccttttttatggctgcatagtattccatggtgtatatgtgccacattttcttaatccagtctatcactgatggacatttgggttggttccaagtctttactattatgaatagtgctgcaataaacatatgtgtgcatgtgtctttatagcagcatgatttataatcctttgggtatatacccagtaatgggatggctgtgtcaaatggtakttctagttatagatccttgaggaattgccacactgtcttccacaatggttgaaccagtttacagtcccaccaacagtataaaagtgttcctatttctccatatcctctccagcacctgttgtttcctgactttttaatgatcgccattctaactggtgtgagatggtatctcactgtggttttgatttgcatttctctgatggccagygatgatgagcattttttcatgtgtctgttggctgcataaatgtcttcttttgagaagtgtctgttcatatcctttgcccattttttgatggggttgtttttttcttgtaaatttgtttgagttctttgtagattctggatattatccctttgtcagatgagtagattgcaaaaattttctcccattctgtcagttgcctgttcactctgatggtagtttcttttgctgtgcagaagctctttagtttaattatatcccatttgtcaatttcggcttttgttgccattgcttttggtgtttaagacatgaagtccttgcccatgcctatgtcctgaatggtattacctaagttttcttctagggtttttatggttttaggtctaacatttaagtctttaatccatcttgaattaatttttgtataaggtgtaaggaagggatccagtttcagctttctacacgtggctagccaattttcccagcaccatttattaaatagggaatcctttccccatttcttgtttttgtcaggtttgtcaaagatcagttggttgtagatgtgtggtattattaatgagggctctgttttgttccattggtgtatacctctgttttgataccagtaccatgctgttttggttactgtagccttgtagtatagtttgaaggcaggtagtktgatgcctccagctttgttcttttggcttaggattgtcttggcaatgcgggctcttttttggttccatatgaactttaaagtagttttttccaattctgtgaagaaagtcattggtagcttcatggggatagcattaaatctataaattaccttgggcagtatggccattttcacgacattgattcttcctgtccatgagcatggaatgttcttccatttgtctgtgttctcttttatttctttgaacagtggttcaactacaagttctccttgaagaggtccttcacatcccttgtaagttggattcctaggtattttattctctttgaagcaattgtgaatgggagttccctcatgatttggctctctgtttgtctgttattggtgtataagaatgcttgtgatttttgcacattgattttgtatcctgagactttgctgaagttgattatcagcttaaggagattttgggctgagacaatggggttttctaaatatacaatcatgtcatctgcaaacagggacaatttgatttcctcttttcctaattgaataccgtttatttctttctgctgcccgattgccctgaccagaacttccaacactatgttgaataggagtagtgagagagggcatccctgtcttgtgccaggtttcaaagggaagggaatgcttccagcttttgcccattcagtatgatattggctgtgggtttgtcataaatagctcttattattttgagatacatcccatcaatacctaatttattgagagtttttagcatgaaaggctgttgaattttgtcaaaggccttctctgcatctattgagataatcatgtggtttttgtctttggttctgtttatatgctggattacatttattgatttgtgtatgttgaaccagccttgcatcccagggatgaagcccacttgatcgtggtggataagctttttgatgtgctgctggattcrgtttgccagtattttattgaggatttttgcattgatgttcatcagggatattggtctgaaattctctttttygttgtgtctctgccaggctttggtatcaggatgatgctggcctcataaaatgagttagggaggattccctctttttctattgattggaatagtttcagaaggaatggtaccagctcctccttgtacctctggtagaattyggctatgaatccatctggtcctgtactttttttggtgggtaggctattaattattgcctcaatttcagagcctgttattggtctattcagggattcaacttcttcctggtttagtcttgggagggtgtatgtgtccaggaatttatctatttcttctagattttctagtttatttgcatagaggtgtttatagtattcttgatggtagtttgtatttctgtgggatcggtggtgatatcccctttatcattttttattgtgtctatttaatttttctctcttttcttctttattagtcttgctagcagtctatcaattttgtcgatcttttcaaaaaaaccagctcctggattcattgattttttgaaggtttttttgtgtctctatctccttcagttctgctctgatctcagttatttcttgccttctgctggcttttgaatgtgtttgttcttgcttctctagttctttccattgtgatgttagtgtatcagttttaaatctttcctgctttcccttgtgggcatttagtgctataaatttccctctacacactgccttaaatgtgtcccagagattctggtatgttgtgtctttgttctcattggtttcaaagaacgtctttatctctgccttcatttcgttatgtacccaggagtcattcaggagcaggttcttcagtttccatgtagttgagtggttttgagtgagtttcttaatcctgagytctagtttgattgcactgtggtctgagagacagtttgttatawtttctgttctttcacatttgctgaggagtgctttacttccaactatgtggtcaattttggaatgagtgcaatgtggtgagaagaatgtatattctgttgatttggagtggagagttctgtagatgtctgttaggtccgcttggtgcagagctgagttcaattmctggacatccttgttaactttctttcttgttgatctgtctaatgttgacagtggggtgttaaacgctctcattactattgtgtgggagtctaagtctctttgtaggtctctaacgacttgctttatgaatctgggtgctcctgtattgggtgcatatayatttaggatagttagctcttcttgttgaattgatccctttaccattgtgtagtgaccttctttgtctcttttkatcwttgttggtttaaagtctgttttatcwgagactaggattgcaacccctgccttttttcrttttccatttgcttgatagatcttcctccatccctttattttgggcctatgtgtgtctctgcacgtgagatgggtctcctgaatacagcacactgatacgtcttgactctttatccaatttgccagtctgtgtcttttaattggagcatttagccccatttacatttaaggttaatattgttatgtgtgaatttgatcctgtcattatgatgttagctggttattttgctcgttagttgatgcagtttcttcccrgaatcaatggtctttacaatttggcatgtttttgcagtggctggtaccagttgttcctttccatgtttagtgcttccttcaggagctcttgtagggcaggcctggtggtgacaaaatctctcagcatttgcttgtctgtaaaggattttatttctccttcacttatgaagcttagtttgtctggatatgaaattctgagttgaaattccttttctttaagaatgttgaatattggcccccactctcttctggctggtagagtttctgccgagagatcagctgttagtctgatgggcttccctttgtgggtaacctgacctttctctctggctgcccttaacatttttttccttcatttcaactttggcgaatctgacaattatgtgtcttggagttgctcttctcgaggagtatctttgtggcattctctgtatttcctgaatttgaaygttggcctgccttgctaggttggggaagttctcctggatagtatccttcagagtgttttccaacttggttccattctccccgtcactttcaggtacaccgatcagatgtagatttggtcttttcacatagtaccatatttcttggaggctttgttcatttctttttactcttttttctctaaacttctcacttcatttcattcatttgatcttcaatcactgataccctttcttccagttggttgaatcagctactgaagcttgtgcatttgtcacgtagttctcgtgccatggttttcagctccatcaggtcatttaaggacttctctacattgtttattctagttagccattcatctaatyttttttcaaggtttttagcttctttgcaatgggttcgaacttcctcctttagctcagagaagttttatcgtctgaagccttcttctctcatcaaagtcattctctgtccagctttgttccattgctggcraggagctrtgttcctttggacggggagaggtgctctgatttttagaattttcagcttttctgctctgttttttccccatctttgtggttttatctacctttggtctttgatgatggtgacacacagatggggttttggtgtggatgtcctttttgtttgttagttttccttctaacagtyaggaccctcagctgcagatctgttggagttggctggaggtccactccagaccctgtttgcctgggtgtcagcagcggaggctgcagaacagcaaatatttctgaacaccaaatgttgctgcctgatcattcctctggaagctttgtctcagaggggtacccggccgtgtgcggtgtcagtctgcccctgctggggggtgcctcccagttaggctactcgggggtcagggactcacttgagaaggcagtctgtacrttctcagatctcaaactccatgctgggagaaccactactctcttcaaagctgtcagacagggacatttaagtctgcagaggtttctgctgccttttgtttggctatgcactgcccccagaggtggagtctacagaggcaggcaggcctccttgagctgtggtgggctccacccagtttgagcttcccggacttttaaaactaacgacttttaaactatagtttgcatcagagtcacctggggagcttactagaatccagatatgtgagccttcccttccccaagagattcaggatctatgcggcctggcatatgtacttgaacaagctcagtgaagagaaggtatraggcattttataccttagcatggatttatatatttattttctctcctttgttccaatatttatttattatccttgatctagaacttatttatttatttagttttctaattgacaaataaaaattgtatataatttttaattatatacaattatataattgtatataattatataattgtatataaaatatggtgtacaacatgatgttttgatatatgtatacaatgtggaatcttaattagtatgtatttaaatacctttataacttcccaggagcagaaatatcaaacccaataagtgcatgcctaccaaacaaaggggatctcagattcgtggcctacatattaaatccagtttagcccactggtttaattgctttagctaacaccataaaaatacactgtgttgctttaacttagatgccctggtttagaaagggaatatattctcctgccagcccccattctccttattgccaatctctgcaactttacagctttgtgatacctgactggcccgtgcaggtaagtgaatttctacccyaggtaagcaattagagaattagaagagtagaaaaaccaagtgatttcccgaaagtgagagcaaatcctcattgtagcctgtatcaytgcttaaccaaatcaccctttcatgtgggaaatcaaaacaacaatgtttcctatatcaagatgtggaatttttctctttcaaataatgtatgaaattcactgtagcaagtgatggcagctcacaggttctggtccccgactccctctgctaacctaacctgcrttctgctgtgcccctgccctgcttgagacacctattttgtgcctgtattctagtgggcagcccatccctcgagtggaatacatggaggaagaaaagaaaacayrsggcacagygttcaagactcygaagtccttgtataaaaccyrtgcttrytrkgmgkasrrtcacatttttmcacytcytgaaaagtaskgtgkcttccatgragdtaacattccccagctggaagacrttyytyarttmctgcagagtaagtccacatcagggtcaatggccctgcagaaagttgggggaggattgaggcaraggagagggaaggggaagacaagtatgtggaggcaagtatgaaagcatgtgcttgtaggaatgcatgcaggttgattcctccaggaagaactaaatttcactgtgctctgccttccctccagcccctactgtgtttatccactttcattcaatcaaacacctgaggctgtggattttgccgtgtacctgtccctgaaaagtattttctttcacacttaaagcccaaggtgcttcactgaggttttkttttgttttgttttgttttgtttgccctgtagttcctgctgtgttatgagttaggagtgtgtgtttgtgtaagaaatgtgctattttcggggatggtgccaagagccctgagctctgagtctgtgcatctggtatgaatcctgccttcratcctctccagctgagtaaacctgcctcagttttgtcatctgtcaaatggacactgtatcaactctttagcttttcccatagggaaattatgagaatgaagtaaggtgctgcatatggaaacaaccagcacagtcttgcatatacagcaggtattcagtgmrtttggactgaattgaaatctgagtagctyaataggtaagtacattgagtcgcaagcctctctgtacagtatatccaggtgaaatgggtgttactctttctgtcaagaggatgttaatttagcaaaaacaaaataatgaactagcacatattgaacacctactgtgtgccaggtagaataagcagaagtggggagacagactacaggttacaaaattttctatatatcagagctgtgcagagatgggccactgtgggggcaatgagccagggaaattacttggcaggaagggaagttgtagccaggacagtttgggggtgagttagatgaccttttgggtcccttccattagaaagtctttgcttcttagataaagaagggagtaagggtccaagcagagtgtgcttcagcctgaagacacagagaacatgggggcaagaggcaaggggatctcaaagacttcttyagctaattacttccattgccatggccaataataagaataataaamcagtaatactagcagttgggaagctacataatagtaattaagagaacagactttgaagctagactgcctgtggctgtgaccttgaataaaacctttaacctatctctgtctcagctttcccatcggtaaagtgggcawaataaaagtgtctacttcatagggctattgtggggattagtagcatatctaaagtagcttaaaacagtgtcttacatacagtaggtcawatatagtgttagctattattaccattatcactgtcactatccttatcctccaaagtttgcaacaaactgagagacagatacaggaaccatagagatggtgatcagaggtcagctttaaaattgagcgatttagagaatgtgatatagatatgcacacaaatggacttgctaatattttaccccttaattaggtaaacttacctgccaattcatagagcatagtccattgcatggccaagagcagactggaatgaggtcctctgtgaacaatcaagagagaaagagcagtacagaaagagttaaattgacaatattcatattctcttcccaaatgctccagtcagacaggtcactgctacttatggggtagactgtgtgaggtgcagtacagaagctggaagcactctatccatactcttcccttctgggaaatgaggttcaaattccctcttcactctagaagcaggagaagtagggaatcattgttccaccctaacaaatggtaatgaaagctaaatttattgcatgtttccaatgtgctaggctctgtgctaagtactttgtattcattagctctttttattcttggaacatttctaagaagtatctatccacattatgcagatgaggaaactgaggctcagaaatgggaatttacttgatccagatcacctagctagaaagcagcsaggcagacatctgaagccaagtctgcctagcgtcaaagcctatgtccctgggcagttatgtgtactactccactacctaaaggtctcctagtgcctctgactcagtggtgatgagctttgagttttctttcttcttttcwtcccagcttgcmctrbtkycydcytcygacctgtrgctggcctgywttcctctbrggatwtckygggtddcctgrycttcyvagtcttscwckrcacacagyacatcagacatggatccragyscrtkkrtrhccccraayygtgagtactgtcctccagctaccagttgccaggcacaatgagcgccatcttttcctgctgcaagaatgaggtttgggttcattgctggctggtccacaggactagttgtctagactgtttgctggtagtactaaaaacaattcatctattctggagatttgctccatccaagtagatagaccagactgattggagatttggtcatcctgtgatccaataactcagaactcccttggcagtgagaatgagagatcccaatcaagttccaaagtcaaagctacgaagttgcaaatgagaacaggaacaagtggcagccaagctatctcaatacytcctaagtatacatctagattactcttatctttctttgcctagattgtgtattgggtagaggtagagaattgcagccattatgcttcttacttgggtgtttcgttatccccttagtctgataaaacttatgcaacttataaaaaaattaatggaacatccaaaattgtttttccttgcccataaagttcattgctacaaatccaaaaagacctgttccaaatggacatagcacatacagtgttaaataaatgtaggttttcttccctcactgctgtccacctccagactaacagaagagcagcactgtttttgttttagttcccagtggaatagctgagcatattgtatctgcccagggaagtcaataccagggagaagacaggatgagaagtgttcatgactcatagctcacttaggtatatgggagcatgtccacaggaatattagctcttctgccyggtaccccactggggatactcttaagacccttggctgctgtgccctaccctgcacctgtctcttatttttccttccttttcttctttttaccttgtaccctgccttttatgatcccaacctctgcatatcacttattcctgggagagggatcataagcctaaaagagttatttccattctttctgcccattcctcatgtagaaagactgagtctggcttggcttaaacctcctcccctccgagctctctgtgctttctgtctttcagtracwwctgcyatgagctgttgggacatgtgcccttgttttcagatyrcagctttkyccagtttbcccrggtaaggaatggattttttagccttctagttataggtctgtgacctgaatttctcaaatgagttgagcccagggaggggtcctcatgccctctgcaagagcggaaaccaggtacagttctatgatcccacctgaaatgggtgtgtggttctgggaagctaaatacccatttcggagatcaagcatggggttggtgaatcactcatcctctgaatcatatgtgtgttcttsagtgtactaatctcatttttcctgctagagcctttcatccatgaaagcctccctgattcccatgcaggaactacctcaccttcttccaatctcttagtacattccccttaccttttcagggctgttgcaactttctaccttgtcaggcagttatttgtgtatatgcttgaattaagtgaggtgacatttgccaagaatccaatgctgataccctgacttagagttaacaaagaaaaaaatgagctgaatatcttatcaccatcatcaaagctgcaaccctgcaacctagaatttcattcatctttcacagtggttaacaagctcaaaaaaaagctttctttttctttttctttcttttttttttytyttttaaggcaaggtctcactctgtcacccaggctggactggagtgcagtggtataatcayggttcactgcagcctcagacttctgggctcaaacaatcctcccacctcagcctcctgagtggctgggactacaagcacatactttcatgcctggctgaatgttttaatttttgtggagacagagtctcactacattgctgaggctgacctcaaactcttggcctcaatcctcccatctcaccctcccaaagtgctaagattacaggcaagagccaccacacctggccaaaaaagaaagttttgggctgagtaaaataatgctaccaattctctccaggcactgagaggcagcctaaaaccatggtttggtagctgggatcatgagaaggttgaatggtgttctgatgtacctaggctccaaccctgccactaaccagctgtgtgacctggggttacattatcagccaccctgtgcctcagttttaataaaagtggatcagtcaaaagccctctccaccagtcatcttcctcacaaagaagcacaagaatcaaatggaatgacctatgagcaaatgctgagccaagtattgggatttcagaataatgggattgtgtgtgaatttaatgggcattttccctcagctggcagaaataaacattcccactgtcaaataaagaagctaccactaaatatttgaaacaaacaaacaaaaaagtggaatttattgcttgctaagtgagggaaaactgtacttgtaagatgcagcctctctaaacaaaaggaaaattacttttatgtgaggtttggggaattatggagttcaaagatcgttggacttttggaagtggaagtgtttmgggattagttgaactttaactgtagaagcatcaccaatgacattcagaagtgtggttactgctgccaagatatctttgattgcttgggacagttttaaaatctggatttgttactgtggccaaaaaacaatcagatttttccttgaagaataggaaccttttattcttaccaccagaagttagtttacgaagtcagaggctaagtggcagtcctccttaagccatttccactttggggaaccccacagaagagtggacagttgctcaagtcaacaaacaggagctcttggggcatcagtgtcacatggttccaactttgatctggacagttccaaggcagcaagtcatgttgaaagtttcctgagaacattcctttttgatcagaggcaggacttgcttcccactrcagtayaggatggagtggggctggagcacagggaatgtggggcyccccttgttgtaggcaaactctaggctcacaaagaatggtgactaagagaacaaggcgccattttggtcttggatttatcagtggtttctagttgaattgagagagcagatccaggctaagaatttgaatttggttcactctaaatcagaaagtattttataagcctaatctgaaccaggctctggacttggcccagggagtgatatrgagatgcagaccatgtagcttcttgcttcaaagtgggtctaatcatagtcttcatctctgtctacaagcactcctctggtgatctcactcaatttcatggctttaaataccatctctactctgatgacggacacatttacatctgcagccaagacttcaatccccaaattcagacttrcatattgaattgcctattcaacatctccccttggatgtctataagacatctctaacatcctatccaaaactgagttctggatcttccttctcaaaccttctccagcacagctttttctattatcagttcataggaattccgcccttccagctgatcaaaccataagcactttgggacattaccaactcctttttctcttaaccccacagccaatctttcagaaaatcctgtgtgttctaccttcaaaatatgtgtagagtctgaccatttcaattatgtctactgctaccaacttggtctcagccactatcatttctcatcctagtgactgcggtagcctcctcagtggccccctctagtggtctctaccctggacccctccagtctccatgtgttctgtctacactcagcctctccagtctcctggtgtcccatttactctcaacctctccagtgtcctggtgtcccgtctacactcagcctctccagtctccttgtgttctgtctaccctccacctctccagtctcctggtgtccctttaaccctcagcctttcggtgccctggtattgtgtctacactcagcctctccagtctcctggtgtcctgtttaccctctacctctccagtctcctggtgacctgtctaccctcaacctctccagtctcctggtgtcctgtctactctccgcctctccagtgtcctggtgtcctgtctacactcagcctctccattctcctggtgtcctgtttaccctctacctctccagtgtcctggtgtcytgtctaccctcaacctctccagtctcctgatgtcctgtctacactcagcctctccagtctcctggtgtcctgtctaccctccacctctccagtctcctggtgtcctgtctatcctcaacctctccagtctcctggtgtcctrtctaccctccacctctccagtctcctggtgtcctgtctatcctcaacctctccagtctcctggtgtccyatctacactcagcctttctagtgtcctggtgtcccgtctaccctccacctcttcagtctcctggtatcctgtctaccctccacctctccagtctcctggtgtcctgtctacacttaacctctccagtctcctggtgtcctgtctatcctcaaccccttcagtctccttgttccctgtctaccctccagtctcctggtgtcctactctaccctcaacccctaccatctcttggtgtcctgcctctaccctcaactgctaccatctattctcayacagcagscagaaggagtgcttggtaacacaagtgagatcatgaccatctatctgctcattaccctgcaatggctcctgtttcactgaaaggaaaaactcaagccctaaaacatctaaaaatattctacatgatctggctctggatccctctttgatatcacctgccactgccccctcactaattcttctccagccacattggttcctccctgtgtcttgacccaaacaacgctgccttttcttgggaaagaaatgcaagcttttgcactggctatatgcttggccaacagtgtgcttccctcagaagtcagtataaccaacaactccacttccttcaagtctgtgctcaaatatgaccttctcaatgatgcttaccctggaaccctatttaaaattgaagtctcccctgaatcccctggagctcttagtccctcttgtttatttcttcttttgtttcttctttccaaagaacttatattcttctaacatagttatgtatatgttcattatttattgtctgtctccactaaaactcacaagatgtctttactgattttatacactgcctggcacatcaaatgaacttaataaatattttgagagtgaattaatatatacagtaggaaagacacatacacacaaggcaggctgcagtaagtgctgtaaaagagacaatgagacagtagaggaattctgcaacagaagctgtggtgagaattaatcyatgatgtgttagactctccagctatatatatgcctggaccgatgtcaccacttatctgcagttctcctgtgatgtttccagggtacatgattaagactcatttaacattccaggaatrttctgctgatgaataatcactgagctggagtcaagagaagaagctttagatactaaccgaccctgtgatcatgagcaagtcacttcccttctctgtgcctcaatttcctcacttataaagtgaaaacaaagggccaagtgagggtggaaggatccccctaccctggagatctgtgattctataacatatgggcaggaaagacttgataacacactcagggtctatgtgggctgttctgaaggcatctggccacccatcacctttttatggccaagtactaggttggttctgtggttccaattacaggaacagaacaggttctattttcccccaattacaggaarttggcsttgcctctctgggtgcacctgatgaatacattgaaaasctyrscacagtaagtcccttctctccctgggtggatggtggagtgctatagkctatggccctcaggtctttgaaactttcctactcccctggaagccaggttatctggggaaaaaaatcagaatgtggtgggttacatttgcacaagtgaaacttcacattttgatagatttctccttaataatttgattttgaaatcagctacctacagatgtttacatctcttaaatkttaagcagtatcttgaacccaccaacaggctataatagtagcccttgaaaacccttggcataaagtgtgtgtatgaagtaatctggatccagagctttgaacatggaatgtttacatctctacttttcacaccagagcatacattaggatcttttctttctcagacatgagggagaaatgggggtgggctttccccttcttgctgaacactttcctctcctgagtatatctgatgacacttgtccactggggctatagaagcaattctacatagcaggtgatttccttccttcatactcgtttctaattttagtacatcccaccccagccactagccacattgcctgtcctggaagttgaaaaataaacatttataattgaattrtggactgccaatgagtgcaaatctattattaagatatatcagtttagaagcttatgaactcgttccatcaaaaggctaaaaactcccagaaggttatcttctcactgacagctgctttcaggtgctggacaagtggctttttcttcctcatctctaacaatgggatgcaatagctcatatcttgcccatctcaaaggcaactaaaaatttaactatttaaattgaattatttaaatttttgtgaacatgggtttttaaatgccagaggctacagagatacaaggagcggctttcaaagaagttacagagctagatagaatttctcatctctacaaagaaaataaacttggaagtcaaagcatcatgttatctgccataacaatattaaaatgacttatcaccaatgcgacttttctaaaaaattgttactgattgaaaaaatgttactgattggttgrggaacagtcctggattcttgctgcccttaatttgctgtgtaactacatgcatgttgccttaccttcctgggctgaagactcctcacctgtatgtgaggaggtcagactgactgagctctgacagccctcccaggtttaacattttctagtccaataaacagatgtaactaataacctacccctaattctccaaaactgtgactgtctccagcagctaactgagctctgggttcctcttagccccagaaccccaatattctttttttcaggccaactctctaggacatattgaactgtcagttattgaaagaaaagtacttggttatttgcataaatgcagtagttgacttcagaaacatccccaagttttagcatggatgatgggacattctcctcactgattctatcactacccartctgctacctcccactgttgtgcctaatgagctctgccagcttcagagcatctgaggaacatctcagtctagttgacaccacagagaaaaaaacaaaagagatggaggagttcctgtcatatggagaacawattgttgggagcctccttttggggcttcttagtacctcctgatattttccatcatgctttacattcagccagcactcaacaggtgactagatagagtgagacacaggacacagagacgtgatcacaggtcatgctgattcagagaacaaacctgcacaggcttctacctgggcaatcctgtccatggcactggggcagttgctgccttctccttctttgaggtgtgtactagtcaaagatctccagagagaaagaaccagtgagatatatatagagagagaaagagagagagggaaatctgagaggggacttattaggggaattggcttacacagttatcaaggctgagaggtcccacgatatgctgcctgcaagctggagaacctgaaaagtcagtggcgtagattagtcaaagttcaaaagcctcagaaccatggaagttgatggtatagctctcagtctgagaccaaaggcctgagaacccctgggtggtggttgggtgcgagtcccagaatccaaaggccagaaagcctggagttctgatgtctaagggtaggagaaacagggtgtcctggttccaagagagatagaatacgtatgtggctttcctctgcctttttcttccatctgggattccagcccattgggtggttcccrcccacaatgaggaaagatcttccccactcagtccactgactcacatgccaatcccctccagaaacaccctcatagacatagacacaccccaaaataatgctttactatctattcaggtatcccttcatccagtcaaggtgacacataaaattaaccatcatagagtgtgctctcagattgactttccattccagatttrstrgttkrctgtggastttgggctctgcaaacaagkakactccatawvgvcatatggtgctgggctcstgyyawcctttbgtgaattayaggtatgaccttcacaggaaccaaggatagatttaaaagtggtgggtacagaaaaccattattgtgctttcaatattgttgaaaccctatttgtatccgttttgatatgcaacctgggaactcattctccagtgattggtaccttagcagctatgatttgatgatggctgtgggttttacagatagaaatggaattgcaagtacacatatctctggggagaaggggcctcctgattccaaggctgacctatgcatgcagccttgtgagtatgcaaacacatgccagaaagtgtggttggctcccacgtcatctattgaccacyttacttgaaagtaattggaatgaattactcctttctcccttggctgtaggttttagatgagctatgaagggtagaacctagtatgtgcaaagtaatttggctcacagcatttgggctgtgatgtagaaggaatcggggtgagatgagagaaggggcacaaatggcctatgggatgcagcagggaatactgatcctgatttaacagtgataataacttttcacttggggcctacagyavkgcttatsakagaagmcaaagcttctccccctggagctggagargwcarccatccaaaattrcwctgtcayggagttccagcccctstrtyacgtggcagagagttttaatsmtsscaaggagaaagtaaggtgaggtggtgacaaaggtgagccactagctctgggggcctcctgactggtgccactcatctgtgggtggttggccaggagagtggactccaatgtctacagcaactttgtaccatagacagtttctctcccatgttctccaccctccttttcttccgttctctgttggaaggttgggcatgctgacctttgcacacacccctgccacctggtccctgttcaacgcaaccaccaagtcaagacactgaaccctcctgcatacaragtggccacagaagtctccccacaaaatcaaagaagtcttataacctaggaagtcctttcttcactttcttctcccaaacacctacaaaatttgcttcctcctttgtgtctttacccaaatttaatctctatatgtctttctctaaccaacttatttctactcatccctgccaccagtgcgtctgtaatacttattaacttgtaatatattacataaggtaagctccatgagggtagaaattttgttctttctattttctgtttttcctccagcccctggaacaatacctgacacagagtaagcactcaataaataattggtgaaggcattaatcccagaggcagttcagcaagaggctgatggagtggttctgggactctgagactgttggccctctgagtgcacagttcctgcacccaagcaggagacagactgggcagagggtccacctggacatgaatatcctaatactcactgtatgttaccacttaaaaaaatcttatcagtgatggatgacaggcatggaacatacaggcctttgggagtctatgacactgggtatgttagctttcaaccctatctatggcctctgagaggtcagaggaatggaggggagtggtgatagaataaatgacttctcaaagaaatccgcacttttgaaaagagagacatgagggaggaaagagagacataagggagaaagtcaaagacaaatgaacatacatcttagtccttcctttctaaatccaaattccatcccccccagacccctcacaaagaaaggtaaaaattatccttttgccagctcattcacttaccttacatttgcaaggtaagattgtgggacaagacaggtccagctaacatttgtttsagaaccctttggaataaagagacttcaaagaggactaactttctttcttttaaaatggatattccttaatttatgtctactatctttagataattaaaggtaaaatgctggcccacaaatccacttggtgtggcctaaaatgactatttctccagctctgtccagagctctcaagtccttctggctctgcttttttaattctctcctaaactgggagcctagcctccttccagcatcatccccctctccctccaaggcccaaggtttggacccaggcattggagcttagaggcagtgctgatgagcaccctgtcatgccaagatcacatttggatgggccctcctggagacaactctctaaccagcaagtgatcagtcccagaccagcagggaagagcttgccaggaaacaggcctgtcagtaccgaggcctcaagggaaacaaccatgaaaaccccattctgctgagaagtggctcagagaatcaaagagaatgctaaagaacagagttcaaaacaaggaatctgcacatccctttggattccctcaaagcatctcagccaagagaaaccaattctaaccacttggagttttaagattcaagttgtaggcagagatgtgattggctgagcatggttcacatgctacctcctttccagaggagggctggcaccgaatactgacttctggactgatacacacctagtagggtaggggtaaatcacccaaagcaaaaatgagctgctttatgggaagaaggaggaagaggtgcagagcaggcaaaatcacagatgtgtaacatgtggctcatgccaccagctgggttgagacagctcctttcagagaagaagrggtggaaatatatacttggccatttgttcttcatgaaagatagcaactaacactcatagggcacttacaccatagtataacagcatttgctgcaaccccctgaggcaggtaccactaatgccccaattttacagaggaaattggggtacagaagagtggtcccctgtgcccatggtcacaagggccataatagacagaggcagggtttcagcccaggcagcttgacttggaacttggggagccactcttgccaaacttggaggtccctactgtctcccgtaacattgtattttcagtacagcagcttataggttcaccagaggccaacttagaaatctgtgattactttgcaacatcttgttaatggtattgcatgatgtccctcatagaggccctcatggtggatttctcccagatccaggagtaaggcactgggaaggcaggaaagcaaagggtccaggccagtgtcagactgcctgggttccttcccagctgcataacttactgacagtatggccttagtagtcacgcagccttcccaagcctgtttcctcatccataaaatgggtatagcaatggtgcctttctcctaaggtttttgtgaaggttaaataaggaaggatatttgtaaagagcattggacagttagaacttaacatagttcttggaacatagaaggtactccatcaatgttaaatttcattattaacatagtgctttcttcaccacttgagagctatttccctctgcattgattgtcaaccatttcagagcttttttccctctatatagcattctttagctagattttacttactcttgattttatttaatgataggagtttgtggctttattgtattcagtagtttcaytgtaagctatctctgtyttcttggagccaggggactaaataaacatgtgtatatatgtgtttgtacatacacatacacacayacagaggcttcccaagaagactcattaaaactccattccccccgcctcagccctggctgttgaagaccctgctctagggaggtgtccgtgttcctaaaaaagaagtaaaatgccactgagaactctcttaagactacctttctccaaatggtgcccttcactcaagcctgtggttttggtcttaggaactttgytgccacaayayytcggcccttctcagttcgctryracccakacmcccaaaggattraggtctyggacaatacccagcagcttaagattttggctgattccattaacmgyaagtaatttacaccttacgaggccactcggtttctcagtaatcgaagactgtctttccctaccatcgccataggaaaaataataaatttattgaaatatttaattaaggagaaaagcacctccatgtaagccatgggttcattgatggagaagaacttgacaaaaaggtcagaattacccttgtgtcctttttcctttgaccttcctagattccactccacctcctaccatcattccacctttccacacttggtctgtcactgccatgttcctttttctccctcgcctctccatcccttctacgctaagtgtccagttgttatcactctgcctggttctatccactttataagctgtccagtggctcatctgttggccttccactcttccttcataatgagaatattataataattgcccttaagaatatcacagggttacctcatttatcacctgattatctctctagcccttcatactctcttccagcaacactgatcaatttttagttctcatgctctttccagactcctaacccttgcccatgcagttgtttatgtttaaaatgttctcctttccaatctcatttacctggtatgtgaagacatagcataaatggaaggctgcatcacaccttcatccagtgatcttgccatctagactgagttatctgcttagaccatggattctaaaatttgaatgtgcatcagaatcaaatgaaaagccagctaaaaattaatagctttgagtcatagccaaggctaaatttaccaaatttgtgataacttttgggagtttatagacctcaggtgattctgacactagagttttgtgtgaaccatactattaggttcaatgatttcgcttcttgtagcatatgcagatggtaatgtaaaagagaaatggaacagctaatgatttgcctggggagagacctgttaagtccttccctgggaagtgacctatggaaaagggatgctgattacattaatggctctggcattttctaaaacatgcaagtacttataccataatgaggctgtaagctccttgaaagttggggtggcacccagctcatccaagaagcccacttatcccctagtgctttgcactgaggacacttgaagagtttttgcttattatayaagtggcccattttgatggtgtttttctttgtaggtgaaattggaatcctttgcagtgccctccagaaaataaagtaaagccatggacagaatgtggtctgtcagctgtgaatctgttgatggagatccaactatttctttcatcagaaaaagtccgaaaagcaaaccttaatttgaaataacagcyttaaatcctttacaagatggagaaacaacaaataagtcaaaataatctgaaatgacaggatatgagtacatactcaaragcataatggtaaatcttttggggtcatctttgatttagagatgataatcccatactctcaattgagttaaatcagtaatctgtcgcatttcatcaagattaattaaaatttgggacctgcttcattcaagcttcatatatgctttgcagagaactcataaaggagcatataaggctaaatgtaaaacacaagactgtcattagaattgaattattgggcttaatataaatcgtaacctatgaagtttattttctattttagttaactatgattccaattactactttgttattgtacctaagtaaattttctttargtcagaagcccattaaaatagttacaagcattgaacttctttagtattatattaatataaaaacatttttgtatgttttattgtaatcataaatactgctgtataaggtaataaaactctgcacctaatccccataacttccagtatcattttccaattaattatcaagtctgttttgggaaacactttgaggacatttatgatgcagcagatgttgactaaaggcttggttggtagatattcaggaaatgttcactgaataaataagtaaatacattattgaaaagcaaatctgtataaatgtgaaatttttatttgtattagtaataaaacattagtagtttaaacaatttcactgtttcagttatttcctggaatgaaatattcctctcactgccttagaaatacattagctagatagttttgtaacatgagaaaatggccagaggctcatatctccaaccctttgcaggggctccttgtgacactcaaagtcatgcctggacagtcaacggactttgacttttgttgattgtgtgtttgccatgaaaacatgaatatctgagaagcagtggggagaaaaaaaacaatatctttgtagctatgatttgaaattctcatactactttacattttattttggaaatagttaagtcttaaagaatttgcatagtgtttctttgagtttagttctcagaacagctgtagtatcatcaacagcaaattctgggtaccttcccagctccacccaatttgaatctctgaagataaggcccagagacctgtatttttaagtaccccatttttttaattattcatagccaaattctatcaggtacattcagtttgagaaaacctgatttgtggtggtcagtctgccactgccaatgatgtcaatgtggataagctgtttcccttctttagacctcagtgtcactctaacaatgagggagttaaactttataaaccaaggtccattgcagccttgaaatatgattcaagtgttcatatgtgtctttatatagctatgcctgatccactgatggggtgttacaatacctgcttatatatgccagctgggaggaaagaggaatttactgaatgtgtctgaagtttcattgttttgaagttggaattttatgcctgtatctatgtttatgcctttgtaaaacccactgattttaaaagtgaaaaaggacttttttctctgcttttactctaaacaccaaacaatccctgcaaagggattattctgatgtttcttcatttcacatgaaaagttaattattgactctggaacttaaatattagataatatttttgacaatattgaagagtgagttttagtccagtaaagatgttttaatgagcttgaaggtaaagtttcggttaagttatgattttcacaggaagttacatactgaatgaaagataatatttgtatttttggtaatgtgctactcagttcttagctcttttttatccagatataaaagcccagtctatagctatgggatttaataaatttccaatatgtaagtgtttttatttgtttaatttctagtaaatgagcaatattttagaaacagtatcagtctttactgacagatgatcttgctgagtacaatcaaaataaatacataaaaaattctaagcatgtggcattgatgtttaataagtttctgaaagtaggaatctgaattttaactgtaggtttctaagttatataatttagttgtgtttcaaaaaatccaccaataaaatgtcagctttataaaaacagaaaccttgactttattttcacctctaaaaccattagcacttagcccataatagatgctcaataatttattttaaaacagttgctgtgtgagctgcatcacagggaaggtagcgaaaattgtttatcacaaataaactattgtgtaagaaaagtttagaaacaactaaatttgtaattttttcttttaaaagttatcaaaaatttataaattagacaaaatagtgattttttttgagatggagtcttgctctgttgcccaggctggagtgcagtggcatgatctcggttcactgcaacctcagcctcctgggcttaagcgattctcctgcctcagcctcccaagtagttgggattacaggcatgcaccaccatacctggctaatttttgtatttttagtagagatgggtttcgccatgttggccaggctggtcttgaactcctgacctcaagtgattcacccgcctcagcctgccaaagtgctgggattacaagtgtgagctaccatgcccagacaaaattgcaatttttttaaaagaaagatattaccccttatatctagtttagactagattatggctagtttgtatttatgctgcttggataataactgcactatggtaagtgcttaataaatgtttgttgataaataaagataaaaaattataccagtgaaacttcacagttgtccatggtcaggctgaaatgctcagaaagcatttagtgacttctctaacatttgcaaaaaaaagaaaaaaatcatcgaggaaacaaaattaagaaagtatataaaaatgtatttattttgcaaaggaaagattaaaaatgtgtttaaagtatcttcttcccagtaaagtgtgtatgcaccctcaacacacacacacatacacacacacacacacacagatggtcactgtcttttaatagatttcctgtgaagtttcgaaagtaaaattgcttgaaacttgaaagttgctaagagtagattttaatgttctcacccgccaaaaatataaatatgttatgtgatggatatgctaattaccttgatttaatcattttacaatgtgtgtgcacatatatgtatatgcatatgtacgtatgcacatatatgtatatgcatatgtacgtatgcacatatatgtatatgcatatgtacgtatgcacatatatgtatatgcatatgtacgtatgcacatatatgtatatgcatatgtacgtatgcacatatatgtatatgcatatgtacgtatgcacatatatgtatatgcatatgtacataggcacatatatgtatgtgcatatgtacataggcacatatatgtatgtgcatatgtatgtatacatataaatgcatatatgtgcatatctatatatgtattgcacacatatatatacaccacattatacaccataaatatatacaatttgtatttgtgaattttaaaactttcttttaaaaagatgtgcttctctgagagatgggattcttaagtttccaagaaaacattactaaagaaatcataacagccttttaattttttaatttgcctaaatgaataaaagataaacagcaattaagcttgaactgcagtacttatttttctttagatcattcttaggtggtacacgatgtccagaggaagtaagtggatcagcatctttcattgatgttattaaaatttgtctaaactttggatgcctttaatttgctattcctagaagtagacataaattaaggaacatctattttaaaagaaagaaacttagtcctctttgaggtctctttattccaaagggttctcaaactaatgttagctggacctgtcttgtcccacaatcttaccttgcaaatgtaaggtaagtgaatgagttgtgtcaaagggataatttttatctttccttgtgagcggtctggggaggatggaatttggatttagaaacgaaggactaagatgtatgttcatttgtaactttgagtctctccctcatgtctctcttttcaaaagtgtggatttctttgagaagtcatttattctatcaccactcccctccattcctccaacctctcagaggccatagatagggctaagttgaggaattcatcagcaaaggcacagagcagctggccctttccctaagacccaccctgccatatattggagtagaacacattttaaagctgttcattagagagtcaccaggcatcaaaatcatcccaaagcaaaaaattagcttggaacaactactttgcttgcaaaaggtaactgttggtctagaaaggcttcccagctctggcaacacccaaatactgcttctgcccaccttccccaaatctgtgaagataaactctgtttccttggcctaacaaaataaatcaagtttgagagtgaaaaaggaggaagcagaaactttcccaaactttctgttcctagaatgtccttgggaaagccaaggaggcaggaggctgtcyttgaagtcactcttgtgaaaaataactactaattttcccgcatggaatgcagcctggaattacacaatagaggttttgtgactgtgaagtgccttgtgccttctaagacaaggcacctcagcctggggcaaagacagaggagcagactatacatgccttccagagtggagattctcagcaccgaggacagcacccacatttgttgccagtactgagggcagggaagtggatggtaatcctgaaaacctttattaattaattwattwattwattwatttatttatttatttatttatattttgagacagagtctcgctcttgttgcccaggctggagtacagtggtgcgatcttgtctcactgaaacctccgcctcccgggttaaagcgattctcctgcttcagctacccaagtagctggtatgtgacatgactcctggctaattttttgtatttagtagagacaaggtttcaccatgttggtcaggctggtctcgaactcctgcctcaggtaatccacccgcctcggcctcccaaagtgctgggagccagcatgcctggctgaaagcctatcttttaatggagcaagagtcaggcatggaaagagaatgagtttgtacaaacaccaggaaacaagatgatgacaattattttgtttacaggaaactttgaataaattttggctgcataaagacagaatgaaaaagtgtgccatttatctccttaatgacaatgtccaatgtctcacattttacacagacaaaaatcaggcaccattttttttaaaagaagcagtacactcctacatgttacaatataggatagagatagaaagatgtagcatctttcaggagactgctctggtgatcccaattcaaatggcagtttttccatcaagctgaacttacttaaatagactcttaatctccccaagtctcaattttttatctgtaaggtggagaagatgcatgtctatcttataaggttgtcacaaagatcaaacaacatattgtgtatatggaagctctcaatcacttccaatattacataacaattttaaatatttattattcttattcaaagcacaaatgggctctaataagtcttggttattattactctgatcatcttggtccagcaacataatcccaactgaccactctttccaaagagatgacaactgtagagaagcttccagttgagaaaagaattttaattaaagtagaatttagaaatgtgggggggaggagccaagatggccgaataggaacagctccagtctacagctcccagcgtgagcgacgcagaagacggtgatttctgcatttccatctgaggtacagggttcatctcactagggagtgccagacagtgggcgcaggtcagtgggtgcgcacaccgtgcgcgagccgaagcagggagaggcattgcctcactcgggaagcgcaaggggtcagggagttccctttccaagtcaaagaaaggggtgacggacggcacctggaaaatcgggtcactcccacccgaatactgcgcttttctgatgggcttaaaaaacggcgcaccacgagattatatcccacacctggctcggagggtcctacgcccacagagtctcgctgattgctagcacagcagtctgagatcaaactgcaagctggcagcgaggctgggggaggggcgcccgccattgcccaggcttgcttaggtaaacaaagcagcctggaagctcgaactgggtggagcccaccacagctcaaggaggcctgcctgcctctgtaggctccacctctgggggcagggcacagacaaacaaaaagacagcagtaacctctgcagacttaaatgtccctgtctgacagctttgaagagagcagtggttctcccagcatgcagctggagatctgagaacaggcagactgcctcctcaagtgggtccctgacccctgacccccaagcagcctaactgggaggcaccccccagcaggggcacactgacacctcacacggcagggtattccaacagaactgcagctgagggtcctgtccattagaaggaaaactaacaaacagaaaggacatccacaccaaaa

SEQ ID NO: 94994 - DNA, 37920 bp, Homo sapiens
  misc_feature (1)...(37920): n = A,T,C or G
gactgaaagcagagaggcaaaatggcttccccaagggaaagtagccactgaaaagcagacacccaagccttactcctcattctttggagtaatgatattctgatgcaccctccaaacctgccaccaaacccttgcccaaacccttgcccaaaccttgcccaaagttgtcaggaaaaacaactcagaaatactggcattcaaatagctggatggacactgttctctgttgaccccttttcccaccccattgcagtggaaatgcaaggcacagaagatggcgattaaagctctgtcctactccctcctatcaaatgtattaactctcccatctaagcagcaatgctgttgttccagattggttcctgagagccccgagaagaaaattcatgacagtgtctgggctgccaaagaagcagtgcccctgtgatcatttcaagggcaatgtgaagaaaacaagtaagtttccaaaggatgattttccttataccagagtcactccgtgaaatcactagggaagaagcacgttgagaatagaaaaaagaggtgaaattaagaccaggataagcacacaactcagccctttctactcaatgtcaccttgtcgggaaataggaagagaggaaaagcaggatacaattttcctgatactggaaaggtttaaccaaattcttagattttaaaacctcactgtttaccaaagtgggggtagatggggctgttggagatctggtcattaatctctgaagattacaccagtgtcagcatcaaacagaatttgactcctccctagtctagcagttttgtgtttgttattttgttctgttttttgagtagggggtcttgccatgttgcccaggttggtctcaaactcctgggctcaagtgatccttccaccacagcctcccaaggatctggggttagaggtacacaccaccacacccagtttagtctaccagtttttaagtgtcatataaaaagtaaattggcagccgggcacagtggctcatgcctgtaatcccagtactttgggaggccgaggcaggcggattgcttgaggccaggagttcaagaccagcctggccaacatggtgaaaccccgtctctactaaaaatacaaaaattagcggggcatagtggtgcatgcctgtaatcccagctactcgggaggttgaggcacgcgaattgctttaatccgggaggtggaggttgcagagagttgagatcatgccactgcactccagcctgggcgacagagtgagactctgcctcaaaaaaaaaaaaaaaaaaaaaactaaattggcaaatgttaaactgattgatattatgatattatcaagaatgggatatatcaggatccttatacactattgacggaagtaaaataaatttggctgtatcaaaattgtaaatgagtataataactttagtaatcttactttaggaaatctcaacaatggaatactagcatggatgctcaaaatataggtacaagaatattaattatagcagtatttgtattgacaaataaatgggggaaattttcttcaaaggcaaattgggaaaaactaattactgtcaaaaataattaagtaaaccaggggcagtggctcaggcctataatcctagctactcaggaggctgaggcaggaggatccagtaagccaaggagctcaagaccagcctgggcaacatagcaagatcctgtctctaaaataaatataataataacaataataataaaaataataataataataatgagataaatcattatgtgttggctggagagatatccacaatatattaatgaaaaaaaaaatgatgtagagaccccctatttcacatccttcattaacgtaagtttcaggtggattacagatctaaatttgaaagacaaatttacaaggaaatacaggagaatatattcacaaccttgaggtatgaaagcctttcttaaacaaaatacaaaatgcacaaaccataaagtaaaagagtaaataaatctgacttcactgagattatgaaattttgatcatcaaaagaataaaatgacaagctgccaaataggagacgatatctgtaacatacacaaccttcaaaggattagtattcagaatacatatataaggaattgctacagaccagtgagaggagggcaggaaatacaacagacaaacgggcaaaaatacttgaatagccacttcacagatgatgaaacccaaacagctaataaacagatgcaatggcactcaaccttattattacaaggaaaatgtgaattaaaactaaagtgaggccaggtgcagtggttcatgcctgtaatcccagcactttgggaggccaaggcagggggatcacctgaggtcaggagttcgagaccagcctggccaacatggtgaaaccccgtctctacttaaaatacaaaaaaattagccgggcgtgatggtgcacatctgtaatcccagctacttaggaggctgagacaggagaattatttgaacccgggaggcagaggttgcagtgagccaagatcacgccactgcactccagcctggacaacagagtgagactccatctcaaaaacaaaaacaaaaaaaatggggagagacataaacattcagaccataatatatacataaagtttaaaaatgagaaaaaataaactaaattatttaggaatctatacacataggtggtaaataataaagaaaagaaagtaaataattactataaaagtcaagattatcactgtgagggggagagaaagcagtgatcagaaaaggaggggtgctgttggcaatattctatttctttctttctttcttttttttttttttttgagatggagttctgctcttgttgcccaggctggagtgcaatagcgcaatctcggctcactgcaacctccgcctcccgggttgaagcaattctcctgcctcagcctcctgaggagctgggattacagggatgcgccaccacacccagctaattttgtatttttagtagagatggatttctccatgttggtcaggctggtctcgaacccctgacctcaggtgatctgcctgcctcgggctcccaaagtgcagggattacaggcatgagccaccgtgcccggacacaatattctatttctaagcctaggtagtagtttcatgaatatctgctttataactatttattgaattgcatgtataggtttctatgaacttctatagatatataatactttgcaataatagattcagttgttttttttgcagagggaggggcgcagttgagacaaggtcttgctctgtcacccaggctggagtgcagtggcatgatcacggctcacctcctgggctgaaacattcctcctgcctcagcctccccagcaactggaaccacaggtacacgccaccatgcctggctaatttttgtatttttgtagagataggatttcgccatgttgctcaggctggtctttaactcctgggctcaggcaatctgcccacctcggcctcccaaagtgctgagattataggcacaagccactatgcccggccaggatttcttaaaggtgccgactaaggcaatacgtatagtataatctcatttttgtttttaaaataaaccattgtatttatataccagaaggtatggaaaaatacgtagcaaactattaacagtggttagccctggaaaatgtgttgtagaggctggggtgggaggagtccttttactttttactggattttaaaatttttttccactggatgagtcttatttttataatttttaaaactctcataaaaattaaatgttggctgggcacagtggctcacacctgtaatcctagcattttgggaggcaaaagcgggtggatcacctgaggtcaggagttcaagaccagcctggccaacatggtgaaaccccatctctactaaaatacaaaaattagccaggcatgatggtgggtgcctgtaatcccagctactcgagaggctgagacaggagaatcgcttgaatctgggagacagtggttgcagtgagccaagattgcaccactgcactccagcctgggcaactgaacgagactccatctcaaaaaaaaattaaatgtgaaggccaggcatggtggctcatgcctgtaatcctagcactttgggaggccgaggtgggtggatcacatgacgtcaggagttccagaccagcctggccaaaatggtgaaaccctgtctctactaaaatacaaaaattagccagccatggtggcaggcacctgtaatcccagctacttgggaggctgaggcaggagaatcacttgaacccgggaggcagaggttgcagtgagttgagatcctgccactgcactccagcctgggcaatagagcaagactccgtctccaaaaaaaaaagaaatgttaaaaatggttttaacactagcctctcccctttatttgcaccctaggacaccaaaggcaccacagaaagccaaacaagcattccagagcctgccagcaatttctcaaacaatgtcagctaagaagctttgctctgcctttgtaggagctctgagcgcccactcttccaattaaacattctcagccaagaagacagtgagcacacctaccagacactcttcttctcccacctcactctcccactgtacccacccctaaatcattccagtgctctcaaaaagcatgtttttcaagatcattttgtttgttgctctctctagtgtcttcttctctcgtcagtcttagcctgtgccctccccttacccaggcttaggcttaattacctgaaagattccaggaaactgtagcttcctagctagtgtcatttaaccttaaatgcaatcaggaaagtagcaaacagaagtcaataaatatttttaaatgtcacagatcaaaattgtttccttcaaatggggtctgccaattcacaaccagatgacccattttaccctattcactgcagactgaatccagattctacacatacttatccccaccaagaccctcactctgtctccattggcctacttgttcatctttcactcattcgacaaatctttctgaggtaagagcgaggtgggacaaaaaaaaaaaagcataccaatgaaccagacacggtcttattaaagataatataggtttaaaaaaaaaacttggcacagtttcttagcacttaggcagcctttggtatttatgactactatcatcaccattaccaccatcattatcagtcattgtcatcagtggtcactgtcttctgtgagtttccaatctagtacaggatcatagttcagggctagagagatggcatggagtatctcaaatgccattcagaagggcctcaagctataaaagtgggaaggcatgacattagtttttaacatgagagttaaatgatcagaatgacaatataaggaaattaaactagcaacctggctgggcgtggtggctcacacctgtaaacccagcactttgggaggcccgggggcggggggtgggggtggatcacttaaggtcaggagtttgagaccagcctggccaacatggcaaaaccccatctctactaaaaatataaaaattagccgggcgtggcagtgcacgcctgtagtcccagctacttgggaggctgaggcaggagagtcgcttgaacccaggaggtggaggcttcagtgagccaaaatggtaccactgcactccagcctgggcaacagagaaagacttgtctcaataagtaaataaataaataatctggcaaccatttgtaggaatgaacaaagagggaaataattattacaacaactacagagactgccccctgaatgacgctttcctcagacattagaaggaaagagaaaaaaggaacactcatccagcatctggcttctgtcatcccagatgacacggaggcctaaattgggatgcttgccttatgagaagaaacattttaacggagtggtgggtggggtggggccctatttatgacacaagagagcaagcccctcccttcttgtaagagagtgctaggcacatagcctcctcctattcctaatcctcccaccaaagaaagaggcacagagttcattacttagtgggggccagctgtgatcggccaactgccagctgccttaaaaaggaagaccagtgatgctaggatggagtgaaacccaagaggaagtgccatcatgaggaatcaatgagagatctgtgaagagagagggctgggtgggagcccagaaggatagaacctggaagatcaatatctcccgtgagggaaataacaatggagccaggttctaagtcagtgtctaggtcagactggcaacctgaaccacaccagaggcctataaccccgctagagcctgggccagaaaagacacccatagcccagccagaatcgaagactctgcagggatccaatacccaacagaagcctgcttcaaaccaaagacccctcacccagcaggagacccctgcacaacatgatgctgaatcccagaaggaacctagagcccaacaaaaatctgcttcacaagaggaatttcttgccccacagaagcccgcaccacagcaatcacctyacatccaaagggtgctgctcactcaacaggaagctgcctcccagcagggacctgggctaggaaaagaatctataactcaacaggagccagcattgagacaaagacatgtagcccagccagggcctgggccaggagagccacctccagctcaacaagaagctgaatcaacacctgcggcccaggctaaacctggagccaaaagggagccatctgccccgactgaatctacgwcccaagagacacctgaacagtcagacaagcaaacaacgccagtccagggagccaaatccaagcagggatctttgacagagctgggatttctaacaaaacttcaggaactatccatacagcdatcagccctagagtggaaggcactttctgagtgggtcacagattctgagtcagaatcagatgtgggatcatcttcagacacagattctccagccacgatgggtggaatggtggcccagggagtgaagctaggcttcaaaggaaaatctggttataaagtgatgtcaggatacagtgggacgtcgccacatgagaaaaccagtgctcggaatcacagacactaccaggatacaggtgagtgtgaatctggrggaattgaagcctctcagggacagtcattcatttacttaaaaaatactaaaaacttacggtgtatcaggttagctctggtcatccttcaacaatcctgagataaagatcaacatccccattattaaaaaaaaaaaaaaaaaaaaaaaaggctgggcgcagtggctcacacctgtaatcccagcactttgggaggccgaggcagatggattgcttgaggccaggagttcaagaccagcctagccaagatggtgaaacaccgtctctactaaaaatacaaaaattagccaggcgtggtggcaggtgcctgtaatcccagctactcgggaggctgaggcagagaaacacttgaacccgggaggcaaaggttgcaatgagctgagatcgtgccactgcactccagcctgggtgacagagtaagactccatctcaaaaaaagaaaaaaacaaagtctcactctgtcgcccaggctggggtgcactggtatgatcatggctcactgcagcctcaaactcctgggctcaagcgatcctcatacctcagcctccggagtaggtgggactacaagtgcaccaccatgccccgctaatttttacattttccgtagagacgtggcctcgctatgttgcccaggctggtctcgaactcctggccccaagcaagcctcccacctcagcttcccaaagtgctgagattacaggcatgagccaccgagcacctggccaacatcctcattttagaaatgaggacatcaggtagaaaataaagaagtaagggttcttgcacagggccatgcagttaggaagtggcaaagtcaggatttgaagccggggtctttctcccctggaccaggctgcctccctatagaggatttggggaaaatcaaatcccagagtgggaaggcactctgagctagggaccaggagaccaggaaagcggccctcttgccagtgttcattcatccatccacagaaactgactgagcaccagctctggggtagacacgggcgtaagtcccagcaatacaatacaaagacggtaccttacccttctggagtttccaggcaggctaggcagaacattggggcatcaacagtctctcagtttaccaggtctgtcctcttctgccaggaagatacctgctccctgccaggctgcctccataggggactcagtccagccaggcggaagggccttgcgggttgtgttctcagcaaggaggagccgggagagaggtgcgggagccgccaaggtctcaggcaaggtcagggactgacggcaggaaagttgggggagcagcatcagaggataacgggcccaaggctctgggctcaccgcaggcactccctcgccttctccgcctcttcccggggcccagtgctgccccctgcctgcttcacaggagccccaggaagctccgatcttccttctctaggctcaaaacccctgccatggagaaggggggaatacaagttttatctatggaactggaggttacttgttgaagtcccctgatgtggggggaaaaaccaacgcagccctaatcctgaagctgagggtatctgtgaggccctggtccagagggcaggcaatggcggcccctccgcccagaggccagtctgtcttgtctctcccacagctgataagagagtaacgcgtttctcagcgccggggctgctgggtatgctttgagagggaaggaagaggggcggcaggcaaaggcagggattgaggcctgctctccccagtgctgaggatagaaagctgtttctccaggcctccagagcacagtctcaagggatgcccgccccacaccaccgcggcgggcgaggttgcctttcaggcggtccagaagcagttggctgtgtgcgtgtgagcaaggcggtccagaagcagttggctgtgtgcgtgtgagcaagcctcgagcctcctctgtttcccgccatttctcaagcatgcgtcgttccctctacctccgctcttgggccggcccgcggcctgaagctagtgcgcaggcgccgagcgttctcctaccaccatcccccaccctcattatcgggagcatggattagggggcggagacagagggagaaagatcccccaggaaaagcgcaataggagaactaggagacaggagagggaaagcggggctccctcctccaacggctctcaggcacagccacgcctccagcgctggcgccccgcctcgtctttgagttggcagaggacctggcccgcccccaccccaggcagaggctcagaggcgccccactttcccccttcaaaaggcgggccgggccgcgtgctagggcatccctccctgggaaggtgagtgggatggcgagactgagccagcacatgggaggcttcccagcacgtgggaagatcgggacttccctgctggggtgctccccgcggggctccgcactagtcctgcccgaaggacgcttttcgccacccccggggttgcctttttgttggccgcgagccctttaatgcgcggtagggggcggagccagatcttaaattctggcggttgggggcggagcacggcagcggagggagaccagaattggttagggagctggacccagagaagagcaagctcgggattgggtaataggggggcccgacagtagtgtgtagcgaggattggccctccgggcagggcctcgcggctggaattggcccccgcgggaggaccgcggggaattgatggagttggccgggggaacggagcccgccgaggccgctatggccccggcctcgaagaatgccaaagagggctcaaggagccacggtcgccggcggtggcgaaaagacaaggccaaaggtgagcgcgcggagaccggcagcagcccggaaggaacctcgtacatcctacggggcagtggggacagcgtggactggcccactgccacagggagttgggggggtccgcggactggcccattgccgcttgcggggacaacgggatgatccattgtgagaagggggtgatgtgacagccgagaggcccaccctggcacagggactagctgacgcccggatcggcttgggagcagagtccggaatgcgagcttcgtggaccagggttcccgctcggattccgtattcgctgtgtgaccaagggcaacggatgccctcagtgtttcccacctggggaatgcttcaagcgccgatgttcagggctccagcgctcttgagaggataagggggaaggaggttagcaggtgttactcaaagaggaagtctagcggtgagtcaaggagaggtaggaggaaggggtgcccatagtggagagtgcagcggggccagtaaagttcatcgcagtcccggcctcccacccggcaagtcagtccatccatccatccattcattgtcagtcaacccgcttcagccggctccactggggcctagccctgacccctaccctttccaggacaacgggccctggcttggcttcagacctccacacctgcctcagcaaaagggaaggcctcatttctctagggtgtcacattattttcaggtctcaaaaggcggaacaaaggctgacagaccaacagaaatgctgcaagcctcaggcaggggcaggtcctcagttacaagcatttatcaatcagcatggggacccgtgggaggttcccatgcaggaaggaaactaacaccacccctcagccccagggaccccaaactcattgcttcccctgccgtagaacacatcattagcccagaatagacctggagttggcttcagacacacgcaggctcagacaggctcagagggcagacggactggagcccaagggcactcgctgtcacagcaagacactgagcctcacaccagtatagcatacccagaggcagtacagactgtagttaagaaacgtgggcgtcggagatccggttcctcaggctgggagctgtgatgttctgggcaggagactccctctttccctgcctcagctttctgagctctaaaatgggtatgatgataggagtacctccttttgtgaggttagaatgaatgtagagcgtttggcacaggcacgcagcaaaccctcaggagaagtgaaggttattgttactgttagtccccaccggacggtgaacatcctaaaagcagggctgtatctgccttgtttaccctgtatttctagagcctggtatgccaggcaaataggcactcaaatatttattggattaataagtgaaggaatgtgtgaactgtaacagagatcataataatcacgcttcccttagggttgtcatgaggagtcagaatccagttgggcagggctccctgcaaaacgagccattcacaaaggctcattcctgcaaactccaagatttgcctgtcatttcctgaagccccgccctcgtgccaggctttagataaattaatcagacctcactcctgcctcaagggcatctgggctggctggagcaatcctcgtcatcagtttcatcttgccagtaactggatgaggctagtgtccttaggatcaccccatttcccagatgacgacactggggctctgagggaccaaggccgcctgggcttccttacttggccagtgagggcaaagagatggctgcctcagcctcctcggggcagggagtttgtggacgcacaactgctgtgggcccaaacttgattctgggcccaagaggttccagtcacacagattcattcagcagacattcactgaacactgagctgtgccaggcctgggctgacagattcacagttgagctggggacacagatattactcagataagactatgattgtaaactgtgataaatacaacagagaaaaacaccctgggaagatagaattgagaggcttcccaaggaggcaatattggacccaagatggacaggcgttaagtgctgtgcagggggcaggcaggggaacagagaggacagtatggagaaagacccgaggcttgaggaaacactgagttacagtgcagagggagctcagccagggccaggaggaagaggaagaggaaacagggcaggcagtttaagagaggaggatggtagctgggtacagcggctcacacctgtaatcctggcactttgggaggccaaggtgggaggaccccttgagtccaggagtttgaggccagcgtgggcaacatagcgagaccccgtctctaccaaaaacacaaacattagccgggcatggtggggtgtacctgtagtcccagctacttgggaggctgaggtgggaggatcaattgagcccaggaggttgaggctgcagtgagctgtgatcgcaccactctactccagcctgggcaacaatgagactttgtctcaaaaagagagagagagaggaggatggtacctggcttgggaggccatgtgcaggattgggggctttatcctgaaagcaagggagggggtgttgaagggttggaagtgtgtgaacagatttgtgtgctaaaaagatcctgtggctgctatgtggacaacaaatcaaagagaacaaaatcagaaatatataaagatctgtcatagtcacccaggtaatgatgctaccgcctggaccagggaggaggcagtggaggtggggagaagggccaggttccagaggcctttagtaggcatagtgggcaggactaggggatggattgcatgggagttggggggtggggaggtggccaggatgacatcctgggttccagcttgagcaaatggggagaggtttgttctcaacacacacacagagaccaagacacgcacaagcatgtatatccattcatacataaacaaacacgcccacacaagctcacaggccaagagaaacagagacacagatacattcacaggcatacaaacattcataccttcaaatgtaccagtgccgacggacacaggccaggacacacgccagccatgacacatacctgcagaggtacatatgtacacgtgaaccccagacacactcacacccgaccagaaagcatatactttgaagcacagacagagggagcagcacacagaaacacagcagagatcagcagctctgccctggagctgccccctgctggccgtgtgaccccgggggttatgtcacctttctgtgcctcaattttgtcatctgccaaaagggatgataatggtctctccctcataggttgtggggcaggcgacatgagtcwcttcacataaaacacataaagaaatctcatcacctcctttgagaatgaaaaaaaaaaaaaaaagaaaagaaatcccagcactttgggagaccaaggcaggaggattgcttgagcacaggagttcgagaccagtctaggcaacacagctagactcgatccctatttttaaattaaacacacacacgcacagagaaagagaccaggcacgcagaggctgttggtgcaacgtttgctcttttatgcacacactctcggggatccagccactcattgtccccacctgcatctgattccaggcttcctggcttcagaagcctttgcttcctcccaggccccacacctggcccttcctccatcccccatccacccccaccccacttccttccccaccgccctccttacccctgctcagtccccaggagtcggattcagctgtccagaaactcttcagggcaaagaaaggtccagtgcccagtcagtgggacaccacccaaagccaaatcccctctgccctacctctcccctagtccttacccacggccccagtgggcctacccctgccccagtgccctctgccagggattcctggcgagttgctggcaacctcagcatcccttcctgccagctccacccagcccagtcctcggggagccgcctggaacaggacaaagggcagagctctggagtccctagggcctgggtccagccccttccccactcctttgtgcagtcacttgttttgttggaaatgtcccctctcctcatctttttatttattttattttaatttttttgagacagagtttctgtcttgttgccgaggctggagtgcaatggtgtgatcttggctcaccgcaacctctgcctcccaggttcaagcgattctcctgcctcagcctcccgagtagctgggactacaggcacgcgccaccatgcccggctaattttgtatttttagtagagacagggtttctccatgttggccaggctggtctcgaactcccgatctcaggtgatccaccggcctcagcctcccaaagtggtgggattacaggtgtgagccacggcgcccggcccccactcctcatcttaaaagatccctaccggcatggatgctaccactttaccaaggggcggcagtgcaccaggcactgtccaaaggctgaataaaaaaggcaaaagtccctgccctcagggagtttacaatctagtgagggaatcagagagcaaacaatataaattcaggcatgtctcagagatatttggggttcaattccagaccacttgataaagtgagtcacacaaatttgttggtttcccagtgcatagaaaagttatgtttacactatcctgtagtctattaaagtgtacaacagcatatgtctaaaaataccatgtacatattttaatttttttttttctgtagagacggaatctcactatgttgcccaggctagtctcgaactcctagcctcaagtgagcctcctgctttgacctcccaaagtgccaggattacaagcatgagctaccacgcctggccccatactatgctaatgatcatctgagccttcagcaaatcctcatctttttgctggtggagggtcttgccccagtggtggtggctgctgactcacgagggtggtggttgtagaaagtggctgtggcagtttcttaaaataaggtaacaatgaacttttctgcttcgatycactcacaaaactgttctctgtaacatgtgatgctgtttgatagcatttggtccacagtagaactttcaaaattggggtcaggccaggcacggtggctcacacctataatcccagcactttgggaggccgaggtgggcaaatcacccaaggtcaggagtttgaggccagcctggccaacatggtaaaaccccgtctctactaaaaatactaaaattaaccaggcgcggtggcaggcacctgtagtcccagctactcaggaggctgaggtaggagaatcacttgaacctgggaggcggaggttgcggtgagctgagatcgcaccattgcactccagcctgggcaacaagagcgaaacttgtctcaaaaaaaaaaaaaaatgggggtcagtcctgtcaaagcctgctggtgctctatcagccaagtctatgtcatagtctaaatcctttgttgccattgttcctgctatcaaatgtatttctgtttttttatttttttatttattttttgtagagggggagggtctcactatgttacccaggttgatctcaaactggcctcaagctatcttcctgccttggcctcccaaagtgctgcgattataagtatgagccactgcacccagcctacaaaatgtatttctaaatgtatttctattttttattatttaataagacttagagctgggcatggtggcacatgcctgtaatcccagctattcaagaggctgaggcaggatgatcacttgaggtccagtgttcaagaccaggctaggcaacacagccctgtctcttaaaaaacacaaaaaattagccagatgcagtgactctcccagctactcaagaggccaaggcaggaggatctcttgaggcctggaattcaaaaccagcctaggcaatatagcaagactctgtctctaaaaacctggaaaaaaaaaaatgaaccaggcatagtggtgcccatctgtagtccccactactcaggaggctgaagtaggaggatcacttgagcccagaagttcaaggctgcagtgaggtatgatcgtgccactacactccagcccaggtgacacagcaagaatccatctctaaaactaaaaattttaaaaataagaataacaaataataagacttaaaagttgaaattggccgggcgcagtggctcacgcctgtaatcccagcattttgggaggccgaggcaggcgaatcacgaggtcaggagatcgagaccatcctagctaacatggtgaaaccccgtctctactaaaaatacaaaaaattagccaggtgtggtggcgggcgcctgtcgtcccagctactcaggaggctgaggcaggagaatggcgtgaacccgggaggcggagcttgcagtgagctgagattgcgccactgcactccaacctgggcgacagagcgagactccgtctcaaaaaaatataataataataacaaataacaagacttaaaagtcgaaattactccttggctggtgggctgcagaacagatcatgtgttagcgggcatgaaaacacattaatctactccaccagggccctttggtaaccacatgcattgtcattgagaaatattttgttgttttctgtgcagtccgtctcaacagtgggcttgaaatattcagtaaaccatgctgtaaacagacgtgctgtcatccaggctttgttccatttaagagcataggcagagtacatttggcgtaatcctgagggccctagaatttctggaatgataaatgaacaccggcttcaactgagtcaccagctgcattagcccctaacaagggggtcagcctggccttgaagctttggcgcccaggcactgacctcccctccagctaggaaagtcctggatggcatcttcttccaatacctggtggttttatctacactgaaaatatgttgcttaatgtagccgtcttcatcaatgatcttagctagatcttctgcataacttgctgcggctcctccagcagcacttgctacatcaccttgcacttttttttttgagacaaagtttcactcttgttgctcaggctggagtgcaatggcacgatctcggctcactgcaaccaccgcctcccaggttcaagtgattctcctgcctcagcctcccaagtagctgggattacaggcatgcgccaccacgcccggcttcttttttgtattttaagttgagatggggtttctccatgttggtcaggctggtttcaaactcccgacctcaggtgatccacctgcctcagcctcccaaagtgctgggattacaatcgtgagccacgatgcccggccgtcaccctgcacttttatgttacagagatgccttctttccttaaatctcatgaatccacctctgctagcttccaaccttttttctgcagcttcctcacctctctcacccttcaaagaattgaagagggatagggcttcgcttgggattaggctttggcttaaggaaatgtggctggtttgaccttctatccagaccgttcagactttctccatatccacaataagcctagttcactttttttttttttttccagacggagtctcactctgtcacccaggctggagtgcagtggcgcgatctcggctcactacaagctccgcttcccaggttcacgccattctcctgcctcagcctccctagtagctgggactacaggcacccaccaccacgcccggctgattttttgtatttttagtagagctggggtttcaccgtgttagccaggatggtcccgatctcctgacttcgtgatccgcccgcctcggcctcccaaagtgctgggattacaggcatgagccaccatgcccagctaagactggttcactttcttatcattcatgtgttcactggagtagcacttttaattactttcatgaatttttcctttgcattcacaacttagctaactggcagaagaggcctagtttttagcccgtttcagcactggacatgccttcctcactaagcttaatcacttctggcttttgatttaaaatgagagacataagactcttctttcacttgaacactttgaggtcattgtagggttgttaattggcctgatttctattttattttattctattyttcatctcatttcatttatttgagacagactctcgctctattttccaggctggagtacaatggtgtgatcttggctcactacaacctccacctcccgggttcaagcgattctcctgcctcagcctcccgagtagctgggattacaggcacacaccaccatgcccagctaatttttgtatttttagtagagatggggtttcagcatgttggccaggctggtctcaacctcctgacctcaagtgatccacctgcctcagcctcccaaagtgctgggattacaggcattagccaccgtgcccggcctcaatattgtatgtcttagggaatatggaggctcgagaagagagatgggggaaatggctggtcagtggagcagtcagaacacacacagcattaatcggtaaagttcgccctcttacgtggacatggttggtggtgcccccactcacaatagtaacaccagagatcattgatcacagatcatcataacaaatataataataatgaaaaagtgtgaaacactgtgaaaattaccagaatgtgacacagagacacaaagtgagcaactgctgtcagaaaaatggtgccaacagactggtttgacgcagggttgccacaaaccttcaatttgtaaaaaatgcagtatgtgcgaggcacagtgaagcaaggtattcctgtagtaaactgtatagtatgctagatggtgacaagtgccgcagagaaaaatcacccaatacaccatctcaggaaggccaagtgagcccacaaagcaaaccacatgcagaacatgccggccatggccccacttataaattatgtctcccaccctgagccagcagaacagccaagtgcagtttccagatgaggaaaacagactcatccagggtcgccagcaagggcttgggccatctttctttccttttcttttcttctttcctttctttctttccttcctttcctttctttctttcctttcttttctgacagagtctcgctttatcgccaggctggagtacagtggcgtgatctcagctcactgcaacctctgcctcctgggttcaagtgattctcctgtctcagcctcccaatagtggggactacaggcatccaccaccataccgctaatttttgtatttttagtagagacggggtttcagcatgttggccaggatggtctcgatctcctgacctcgtggcccacccacgtcggcctcccaacgtgctggcattataggcatgagccactgtgcctagcccacatcgtcccattttcacagctgcaagcctaacactgcctcctgaggcctctgtctatccatctgtctgccagccctggggaggggccgtcctctcctgagctaactagcccctctgccctcgctctgcttcttcatgccttccttcctgcttcatatatccactgagcacctgctatgtgccaggtcccatgataggccccagggccacctgggggatgacagtccgggacagaagattcacttccagccaagcaaatgaccctgaggcctcagagcccctcagtcacacaggcccctttcaaggccctaatcttttttgttttgttttaagacagagtctcgctctgtcacccaggctggagtgcagtggcacgatcttggctcagtgcaagctccgcgtcccaggttcacaccattctcctgcctccgcctcccgagtagctgggactacaggtgcccaccaccatgcccggctaatttttttgtatttttagtagagacggggtttcaccgtgttagccaggatggtcttgatctgctgacctcatgatccgcccgcctcggcctcccaaaatgctgggattacaggcgtgagccaccacgcctggcccaaggccctaatcttgtatttgtaattctgtatttcttcttcctaaagggccacaccccggtaccttataagtttcatggctccataaaacctagtcctgtcctgggggagatgaacaaacacgtaaacaaattataaagtgtcaaatggcaggatggaacagaactaaatatcatggcagaaaataacgggggcgtgcatatcttagctggggagaagcaactggggagtacctcttggaagtgacaagctgaggccagacaaggaatctgtggaatgacacgggtgaatgacatgggtgaggaatctctctctctgagcctctgtttccctgtgtgaggtggggatgccagtcacagcagggtgggctgagaggggtaagtggcaggtccaggttacccagtgtggtcacaccacccagtaggaccgacaggcagctcaggcccctagctgagcctggcactgcccttaatcggcttttgtccttccaggagggacaggcagggctggctacctcctctctccccccaacagctggggctggctgtgccagggccagactaggaggcgggagctgagatcactgggcctttggctccctgagtcctctctggggacagagagggcagcctggctgggtgagaggggacggtttgttcaggactggggctaggactcctgggtcctaaaggatgaaggggctgggggcctggactcctgggtctgagggaggaggggctgtgggtgtggactcctgggttctaaggcagaggagcctgtaacaggactaccagttgagctgagtctgggagcaggtggggggcagagcagggagctgagccctctactctgtttacagcacgtggtcctcactgatctttctgggtgggaggtggcttgtgcggctasaccctgggcaggccagccccgcccccgggtttattgccccaggctgctactggcacaagccacagaccagcagtcccagcccagggaagctcggaagatgcctaggaggggtgagtgtccagccagctgagagacgggaatggccgctgccaggccccaggacctagaagggaaaggaaataccttcttctaggggaacaggcaaggtgctgggctttgggagggaagtcactggagcagatggtagcattccaccaagggcagcttgttcaggacctgggtgacagggcatccaagaaacagggcagcctgaatggctgggaaaggatatcagaggaaagatcactggggactggaaagtgtggagatcagacgtagtccagggcaagttttgagatgtggcttccagagtcctagcggggagccccacataagtgtggctgtggacccagagagctgggtttacaaaagctctgccacttgcagtgcaactttaacctcctcacttaaaacctgagcctcagtttcctctcctgtaaaatggggatgctggcaataatagagatttgaacctaggtggtgtgggtcccagagggttagcacgctaaagcagcaaacacacagaaagctctcagcacgggacctgcacggatatgctcaaggtcgacaccagtgatgagtatcgctgttccaggcaggggagcagggccggccatgcaacccaggaccagtggacaagcctgaaggccaggggaccccactgggggagaagcaagactgagttttggggatctcacagagaaacagggagggaactgggatttggagggggttccacagccagacttgaaggatgaggaatgactcttcagtgaagtctagaattgtgaactcctgagttcagggagagctgcgcttggggaccagggtcccgagagatgggaatgggagggctggggctgaactctcccaaatgttgttggaggggaagggcctatgggtagcacttggggcctaagaaggaaagatgggatgggggacccggactcctgggtcctgagaatggggaccaactggaggtttagacttcttggaatctaggagaaggagtcttgggccccaggagaattcatggagacaggtgactagactcttgggttcctggaaggaagaaagaaggaccggcagcctcctggatcacaggagaggtgaatgagttagggaagcagagtcgtgtgggctcagggaatgtccggattcaggaggccagggcagcaagtttctgagtcccaaagaggtgatagcaggggctcctgggtcctgaagaggaagggcttggggcttggactcctgggtctgagggaggagggagctgagggcccaaactcctggctcccgaggagggacaaaggcactgggaactggggccccaaacttctgattcccagagacaagagggtgacctcttatgtctaagggaggaggaacctggggtcctgggcccctggaactgaaagaagacagcactgaggtttgaaggaggagtgggtaagctatggcccagactcctgggccccagctaagcaaggcttgatccagccccacctaacaggcctccccacctgcccacagcctcaaggctcatccacaacatggacctgcgcacaatgacacagtcgctggtgactctggcggaggacaacatagccttcttctcgagccagggtcctggggaaacggcccagcggctgtcaggcgtttttgccggtgtacgggagcaggcgctggggctggagccggccctgggccgcctgctgggtgtggcgcacctctttgacctggacccagagacaccggccaacgggtaccgcagcctagtgcacacagcccgctgctgcctggcgcacctcctgcacaaatcccgctatgtggcctccaaccgccgcagcatcttcttccgcaccagccacaacctggccgagctggaggcctacctggctgccctcacccagctccgygctctggtctactacgcccagcgcctgctggttaccaatcggccgggggtactcttctttgagggcgacgaggggctcaccgccgacttcctccgggagtatgtcacgctgcataagggatgcttctatggccgctgcctgggcttccaggtgagccccctgccccgtgcccctctgggcccacaatgaaggcacctggtggcccctggcctggcctatagtatggtaaagtaaccagtggtcagcattatcggactcagcaaacagcaggtacagaaaggagaagttggctggagctcagacagagctgcaccaggggtctcaaactcatggtccctaggtcatatctgctaggtggtaagaaatgcaacttgcagagcttttttcaccaggatatccactactctctattgtcctacatgcaagagatgtattcactctttgttacctgtctggcccctgaagtcacttgagtttgagacccctcagggagggatctggagccatgtgaccctatagtcattctggccctctctgggcctccccgcacctcagcctccccctcccaccccacatctccaggcttcccttcaggctagcctatcctcagcaacccagcccaggcattcctggaaacctcccctcaccagggctgaacccacaagtattgatcagcccagctgggccagncagctcctccctgtgtcccagccgtgaccctagagtcatgagaaagagatcccggggctgcccaaaccagcatcccagccacaatagccaggcatcaggtgccctctggcctactgggcgcacagccaggggcagggcccagctctgccttggtgcagggcagtctcccctttaaaatgtccgtccccgggagggcagaggcctcccctgtcttggtcactgctccagcccagtgtctagcatgcagtaggaacttggccagtacagagtgaacagaagaacccgccaatcccttgccttggcctcctatggctccatttcctctaatcctgtgtccccattgtatttttttttttttttttttttgtattttgtttagtagagatggggtttcaccatgttggccaggctggtctcaaactcctgacctcaagtgatccacccaccttggcctcccaaagtactgggtttacaggcatgagccactgcacctggaccccactgtctttccttaactgcctgtctgctctgtcagacgctgtctctccctgcccccgtggtggcnggctggtcctatgtctaggcctcagtctccctctctgactgtctttctgcctcaggtccctgtgcctggggggctgtctctggccatctccctgttcctgtcttccagctgcctcctctccccatccatcctctctctgactttcaggaagtccctgcaccatcctactccccacctcacagcctaccagtggcaccaccccgcactgggaatgaaatccaaattcctctgcccaggccctatatgagccccctttgcctctccaatgtcaccacctgcccctctccccactgctcactctgctccagccacactggccccctgactgtcgctacccaggtcaagcaccaagcatgagctcacctttttttttttttagagacagagtctcgctctgtcgcccaggctggagtgcagtggtgtgatctccactcactgcaacctctgcctcctgggttcaagcgattctcctgcctcagcctcctatgagctcacctttaagccttcatgctctctgttccctgtgcagggaacaccctcccctcgcttcagtcagatctctcctccgagacccgctaagtagcctgacccctagtcatcactggtgccctctccacctactgcctttttttttttccaaaccattcgtcattccttgtcatgatactgcgcgtggctttgcttatctgctgatcatttgttttccctttgagaacatcaggtccgtgaaccagccgagagctatgcccagcacacagtaggagctcatgaaacgtttactgaatgaatgtgtcttccccgcacatccctgtgcctcgctcctgccctgtccccatccctctcttgagcggtgggtgacgcagccgcgtctctccacagttcacgcctgccatccggccattcctgcagaccatctccattgggctggtgtccttcggggagcactacaaacgcmacgagacaggcctcagtgagtcccagccaggttctactcgcagcctactctcttggccctcctccccactcctgcccaagcagcctgacccactggggctccctgacaccccttctgacccctaggtgtggccgccagctctctcttcaccagcggccgctttgccatcgaccccgagctgcgtggggctgagtttgagcggatcacacagaacctggacgtgcacttctggaaagccttctggaacatcaccgagatggaagtgctatcggtgagggcctgttgcagatggggacactgaggcccagagactcatctgaggccacagtaggtctctgtggggctccaggcccagggatggcacacaaggggaaagactggggatcagagggagaggtgaagggcacccctgcaggcagaccttccctagcaccccttctgtcccctccctccagtctctggccaacatggcatcrgccaccgtgagggtaagccgcctgctcagcctgccacccgaagcctttgagatgccactgactgccgaccccacgctcacggtcaccatctcacccccactggcccacacaggccctgggcccgtcctcgtcaggctcatctcctatgacctgygtgaaggacaggtagggttccagcctcagccagggacagggacagagccgaggagcgtgggcagcccccaccttggcatccccayggaggggtgcagccctggccagctctccccaacctcacacaccgtctccctcctcacccccaggacagtgaggagctcagcagcctgataaagtccaacggccaacggagcctggagctgtggccrcgcccccagcaggcaccccgctcgcggtccctgatagtgcacttccacggcggtggctttgtggcccagacctccagatcccacgagccctacctcaagagctgggcccaggagctgggcgcccccatcatctccatcgactactccctggcccctgaggcccccttcccccgtgcgctggaggagtgcttcttcgcctactgctgggccatcaagcactgcgccctccttggtgagcctcaggcccccacagccacctgcgcctgctcccatcccacccagcttgctttaagctcctccagcctcagcctcacaccctctacctttctctccccccacacctcccagctcctgctcacccaggtcctgcccaatcttccacctcagccactttatcctctgtccccaactgtggcacccagactctccatctcctccacctccacttcccacccaccgtcctgtctccctgggcctctgtcgtccccctctgatagctccaggccctgctctcctgtcctaccagcctcctggcccacagtccagcttctctgacctccctcttcgaagatcaacatcttgggaggacactgaggcacagagcagagtgtggccatgccccagggcacagagcttgcagcccagcccctctgtactgaccctgaaccctgaccttccattcccgccctctgaggcccccctcctgcaacaggcctgagctcagctcccctttcccaccacctgccctccctgctcccaacctccagccccgacagactttcccagtgcttccctgggcctctccaggtcctgagtcatcctgaccctctgtctaccacatgagcccaaatctgtgcctcagtctgccagtctctaaaactgcagtctgctaggccttggagtgccccacaccccaccttggagagcccagttctcccagcttgagttcctccctgccctcctccccaggcctctgcccctgccaggttgtcaccaaccacccctctcccaaaccaggctcaacaggggaacgaatctgccttgcgggggacagtgcaggcgggaacctctgcttcaccgtggctcttcgggcagcagcctacggggtgcgggtgccagatggcatcatggcagcctacccrgccacaatgctgcagcctgccgcctctccctcccgcctgctgagcctcatggaccccttgctgcccctcagtgtgctctccaagtgtgtcagcgcctatgctggtgaggcccacaccctcagcagggaaacaggactgcatggatgtctgactcctgcagggacgggctggggaccaggactcctgtgactgaggaaggagaggccaggcagaggaatctaagactccttgtcccttttttttcgtgtgtgtgtgtgtgtgtgtgtgtgtgtgtgtgtgtgtgtgtgagagagagagagagacagacagacacaaggtgtcatgtcgctcaggctgagtgcagtggctcaaacacacctcactgcagccttgacctcccaggctgaagcaatcatcctgcctcagcttcccaagtagctggaactacaggcgtgcaccaccactaccacgcccagctaatttttgtgtttttcgctatgttgcccaggctggtcttgaactcctgggctcaagccatcctctcgccttggcctcccaaagtactgggactacaggcgtgagccactgcgcccagcctccttatcccttttgaagcgattggatattctcgggtccctgggaccacagatgcctgaagttctgggcgttaaaactgggcccagaaaggggaaaacaactcagctacccacatatattctgcaggtgcaaagacggaggaccactccaactcagaccagaaagccctcggcatgatggggctggtgcggcgggacacagccctgctcctccgagacttccgcctgggtgcctcctcatggctcaactccttcctggagttaagtgggcgcaagtcccagaagatgtcggagcccatagcaggtgagtgattcactcccgtcacatgcccagccagggtgggcaggagggacagcctagcacagcaaaagtcccagggaagatgctgggcatggtggttcagacctgcaatcccagcactttgggaggctgaggtgggcagatcacttgaggtcaggggttcaagatcagcctggtcaacatgaygaaaccctgtctctagtaaaagtacaaaaatattagccaggtgtggtggtgcacacctgtaatcccagcactttgggaggccaaggtgggcagatcacttgaggtcaggagttcgagaccagcctggccaatatggcaaaaccccttctctacaaaaaaataaattagcagggtatggtggagtacacctgtagtcccagctaccagagaggctgaagcatgagaaccgcttgaacctgggtagcagaggttgcagtgagccaagactgagcctctgtactccagcctgggtgacacagcgataccttgtctcaaaaaaaaaaatttaaaaaaagagtacgcttactgggctgtggtgaggtctgcctccaaccatttggccagtacaatatatggcacccagtaggtgctattagaagatgccagcacccctggtgtgtccattctgttccagtgaccctctgggccacaaagtacttaagtagttattctcacattgttttgcacctcaccttcgtagatttataaagacaagtaaggctgggtgtggtggcttacgcccataatcccaacactttgggaagccaaggcaggcggatcacttgaggtcaggagttcaagaccagcttggccaacatagtgaaaccccatctctattaaaaatacaaaaatgggccaggcgcaatggctcatacctgtaatcccagcactttgggaggccgaggcgggcagatcacgaggtcaggagtttgagaccagcctgaccaacatggtgaaaccccatccctactaaaaatacaaaaattagccgggcatggtggcatgcatctgtaatcccagctactcaggaggctgaggcaggagaatcacttgaacccaagagacgaggttgcagtgagccgagatcacgccactgcactcaagcctgggtaacagagtgagactgtctcaaaaaaaaaaaaaatacaaaaagtagctggacatggtggcatgcctgtaatcccagctactcaggaggctgtggcgggagaattgcttgaacccgggaggcagaggttacagtgagccgagatcgcaccactgcactccagcctgggcaacagagcaagactccatctcaaaaaaaaaaaaaaaaagtaaaaaactaaaactgtagcatcttggccctcatggtaggcagtgtgggtctgataaaatgaacagagctgaggccaagctgggcacgccaggtgggctggaagtgtatctttagcatcgtttgggcacttgcttgcctggtcacgtgaacggataaaactgaagaacacaaaggaaatgtggggaagcagatccatgtggctacaggtgccagacccctagaaatgtgatacaccctggagacttgttagctccctgtgaacagagcctcccttcaagccactgggcctgcttactattcaaatcattttgatccatttacaccttgtggtaagtgtaatcccagcactatgggaggccgaggcgagcggatcacttgaggccaggaattcgagaacagcctggccaacatggcgaaaccccatctctgctaaaaaaaaaacacaaaaattagccgggcatggtggcacatgcctatagtcccagctactcaggaagctgaggcacgagaatcacttgaacctgggaggtggaggttgcagtgagccatgttcttgccactgcactccagcctgggtgacagagcgagactttgtctcaaaaaaaaaaaaacaaaaaacgatatattatgatccccagtgggtagcggtacctaatcccacatcttatcccactgagtcctgccacctatgaaccaaggactattttcatttccttgatctagaagaaaaaataggttcctagaggtaaactgcacctaatcttcccagtcwcacacacacacacacacacacacacacacacacacacacacacacacacatccttcactagaacacactgccccactgccaagacccccaccatgaccacctggggcatctggaactccacccatcccctaggcaagagtctggggaaacacagcctttcacagcgctccacaggcgactgcccttcccatggcattccctgccagccacacacacaaccaaactaacggagccaggcctatctgctctccctctctcagagccgatgcgccgcagtgtgtctgaagcagcactggcccagccccagggcccactgggcacggattccctcaagaacctgaccctgagggacttgagcctgaggggaaactccgagacgtcgtcggacacccccgagatgtcgctgtcagctgagacacttagcccctccacaccctccgatgtcaacttcttattaccacctgaggatgcaggggaagaggctgaggccaaaaatgagctgagccccatggacagaggcctgggcgtcmgtgccgccttccccgagggtttccacccccgacgctccagccagggtgccacacagatgcccctctactcctcacccatagtcaagaaccccttcatgtcgccgctgctggcacccgacagcatgctcaagagcctgccacctgtgcacatcgtggtgagcgacagagggggccggtacaggtgcatttagagaagagcagggcacccggggaggagggggaccgggcacgggtacacctgggaaaaagagctccggagtggggagaaagggacaggcgtgtccccaggggagaacaatgccccgaacgaacgggaggaggacaagagtcagggctgcctccgttttactttgcaattttgagtaccaagagacaggatcagtggggcagccccttgggcttggagaatcaagagaaaaaaaaggtgggtttggcggggtggggagggagaggctggagagaggccggggatcgcagttaaagtcattctcccatccttcccacaactccccccattccctccattctctccccaactcctcacccaccatgtctcctgcctccgtccactccgtctgtatccgtatttcccgctccctttgttcatcaaacccctcctcgctctacccgaccccggtctgtctgtcccccaccctctctccacgtccctccccgctgtcccgtaggcgtgcgcgctggaccccatgctggacgactcggtcatgctcgcgcggcgactgcgcaacctgggccagccggtgacgctgcgcgtggtggaggacctgccgcacggcttcctgaccctagasgcgctgtgtcgcgagacgcgccaggccgcagagctgtgcgtggagcgcatccgcctcgtcctcactcctcccgccggagccgggccgagcggggagacgggggctgcgggggtagacgggggctgcggggggcgacactaaaagcctgttgttcccatctgcgccggcctccgtcatgaatgccttccgggccgggcggaaggggacgcgggctgtgccttacttaagtcgggggtggcaagggggcggggcgggggcccgaaagctgagacccycgccacggggagggggacgcgcacacacaccggtcaccgagacggctggacctgcacgccaccgctgccttttgctgctgctgctgcggcgaccgccgcagggacggggactggccctcccttgcaggtcggtttggtttgttgtaaataaaagtatttaattagtttggcctctctcaaatacggtggggtgtttgcccaccagggggcagcatcggactcaagcggctgggaaccaagaaacctggaatgaggggtatgggggactggatttttgggaccagaagggagtggactccttggtaacccggacccacctcccctcggacttcatccaggtacactgccaggagatgctgggtcctcagctcctccccttgaagaccttcggttagctggactcaccctggtcccagggagaccaggctcagcatccatcagggggatataaaagttaaaaataatctctcgggtctcaaaggctccagtgacccaaacaccctacagaactggagcaaagttagcaggaaatcagaaacaaactggcgctcaaaatactgtaaatgcagccgggcacggaggttcacgcctgtaatcccagcactttgggaggcaagacaggaggatagcttgagtccaggggtttgagaccagcctgggcaacatagaccagtctctacaaaaacatttaaaaattagccgggcgtggtggcacactcctgcagtcctacctactcaggagggtgaggcaggaggatcacttaagcccaggagttcgaggttgcagtgagctatgatcgcaccactgcactccaacttgggcaagagtgggaccctgtttccaaaaaaacaaaaactggaaatgcaagctctgtccagctgtgacaatcaactcttggaccaactctctggccccttgtaagccctgagtttggagttgagatgatttatacccaagacatgccttcaaagggcttctgatcctggattcagagagggtggaagaacagacacaggctgtcacagtccccaggggttccacctgtggtagtcagggagggcttcacagaggtggtgatctgagcttgacactacaggatgaacaaaagtctgctaggaagaaaaaacatgccaggttgtgagagccagctggcagtgatcaaagctgccacctggctagaaaaagcttccacctgaccagaaggtcaggtgcaaagtggggaggggcgtgaggggcctggagtggtcagcaggagcagggcctgaagagcctggagtacgatttggactaaactggagggcagtggggagccacaggagcactttgagcaggaaagggccagggtcagctcagggcactgaaagatcctgctgggacactgggggatggacagaaaagggcaaaactggagtcctacaggccaaggaggatgcctgagctggggcaggagccgtaagggtagggagtgtaggtgtagcatcccagagccataaaaggtgggaaggacagcacctactgatgaggttacaggacagcaaggggacagagatgacacccaggtctggccatggaagcaggtggacagtgaagctgtctcttcaatgggaggaggctcaggtgtgtgtgtgacaggtgggacctgtggagggccattctggacatggtgagctggaaggtctcaggaagacaatccaggagacaacaagggtcagaagtgcagtctggggctgggtgtggtggctcacacctgtaatcccagcactttgggaggctgaggcgggtggatcacctgaggtcaggagttcaagactagcccagccaacatggtgaaacactgtctctactaaaaatacaaaaattagccaggtgtggtggtgcacgcctgtaatcccaactaactgagaggctgaggcaagagaatcgcttgaacctggaaggcagaagttgcagtcggccgagactgcaccactgcactccagtctgggcaatagaatgagactctgcctcaaaaaaaaaaaaaaatgcagtctaggtggaaccaagggactagaacctttccaggaagcctgggcaggtgggacaagcaacaagagggccaggacagagacagccctgaggatcacacccctagtaaaggggtgggcgggggtgggcagtggaaggcaaggctggcgggttctaaggagcagccagagagggaggaagctgcccaggaaggaggatgtagggtgaagggagtttcagggagtggaccaggtcagatgaggattgaaatgttaccctcaggtgtcagcaatgagcaggtgacctcagtgaccttgtccagagccactgcagggtcatggccgttaggcagccagacatagtgggttgaagagggagtggaaggtaagggattgagccagtgggcgccacaagagagcctgatacagggcacatgtgtttagagatgatggacatgtttgaatgctggaggagtgggagagactgaagatgcagaaacaagaaagccgtttcctcacggggtgcgaagcaagggatcctcagctcagaggtcctcgttcacccagcaagtgacttctgagtcagggcctgtgctggggcagggagctgtagcccagaactcttcctgaaggtccagatccactggcctgagtcaccactctccttgtccaactcatagaaccccttggtcacctctgtcaaaacagtcactacccatcaacctgctcctcttttcctgtccccacctcagagatggctccactgtcctccagactagagctctgggtctcatgctggacaaccccttgtcccatagcccatcaatccccactttctgttctctctgcctcctgaatctccttatttatttttctttctttctttttttttttttttttttttgagataaggtctcactcttgtgcaggttggagtgcagtggcaccatcttggctcactgcagcctcgacttcccgggctcaagtgatcctcctgcttcagcctcctcagtagcttggaccataggcatgcaccaccacacctggctaatttttcttttttttttttttattttgagtctcactctgtggcccaggctggggtgcagtggcgcgatctcagctcactgcaacctccccgtcctgggttcaagcaattttctgccttagcctcccgagtagctgggattacaggtgcccaccaccaagcctgtctaattttttgcatttttagtaaagacagggtttcaccatcttggccaggctggtcttgaactcctgacctcgtgatccacccgcctcggcctcccaaagtgctgggactacaggagtgagtcaccgcgcctggccacacctggctaattttttgtagagatgaggctgtcactatgttgcccaggctggtcttgaactccttggctcaagtgatcttcccgcctcaactttccaaagtgctgggattacagacacgagccacagcaccaagccttgcctcctgaatctctatcttatcccctcggcctcttccctgatccaggctccactctctcctacctgaatccctgccagagccacctcctgggctactggcttccagtctcattcctccagttctggaccaactatgaccttgtcctccactactctcaacccttccatggctctccactaccccctcaccctcaggacaaagtccaagctcctcagcctggcctctgctcatctcttcggcctcctccagccttacagttcccctgctggccatacagacttgactggccttccgcttaggcacctgcacgcagtactgctcctgcatgcctccctgtctttggtcacgctgaaacaccctccccacacccattttgcctggcatctccactttgcctggcaccttctgctcctccaagatccagctccaatggcccctcccctggaaaccctttcccgaccacgccaaactcaaaaaagtctctcctgggctcccaccgtctccgcacacccatgcccatcaacgtccatcctcccatctgacccgggctccttgagggcacggcccaggcctgactcatcttggtcaccagcatcgcccagcacgaggcttggcacaccagaagcctcaggaaatgtttgtctaactaataggtgggagagtgtgtgagtgagtggctagacgagggaatccgtgagtgagagaattgagggcaggaagggcagaacggatgaaggaacaggaaggcaggagcagacgagaatcaggcttagggtgggaggaacggatggatgaataacagatccagtatcccggtctcagtttctccaagaaagcaagatgggttcgccgggactgagctcctcccccctccgcctcaagcctcactaagcctcacggttttccacccgagctatgtgcagaatcctaatactaggcgtgctggaaagggcttacccggccagactcggagaacccgttccctcgcgagcccgctcgggcctctgcggagtggaccaggattccgatccctcaggttccgggtctattggccgactgactgggcctggcagagactggcgtctccgaaagcctatcgctgcccgagttgggctgtgggccccgcctaccaggcaaagggtcctgagtggcccagggaggtagaaggccgagtgtccattggctggaagatagtgactgacgtcatggatagctttcgccgccagactccaaagaagcgcctcgcgtgtcggacccgcctccggagggactgagtcggggtgggagccctgggcgtagacggtcgcagaatggtcgtgaatggagtttctggccccacatacctaggctgtttgctgacccgatccttgggtcttgaggaaggttggggatttgagagttcagactccttggttctgaaggaggagaagtctgggacccgaggaaggagggactaggggcccggactcctgggtcagagggaggagggggctggaaacctgaaggtttggtgtctaggagcgggaactccgggatcttgagtcactcgcccgcccagggatgacaggtttggggttcaggattttatgaggctatttatgggaagggagccaggccttacccccaggcaagtgttctgggtaatgaggcggagcttgtaatggagagggagaaggaagaggctcaggggaagctctggcctggatatgccctttcctcatcccgaaaagggaagtcagaggcaggtgctgtctgcaaaaggaacccagagctagaggagactggagactcacgtgagactaagagaaaaatagagataccaaaggggagatggcaaaaataaaacagtaataataacagagctctcttgtactgagtttactgtggcctggttctgtgctgagcattttacataattatctcatgtcttcctcgccacagctctgagagattggattattattagtagtattatccccagtttacaagtgagaaaattgaggcctagtgagggagaatccagatacagatgtaaagatacaagagagacacaaaacatagatggagataaacaaagagttacaggcccagagagaaaaaagaaaacgcaggcaacaaacaaaaggagaggggctgagagctgggactcctggggctggggaactggagagctggggacccggactcctgggtcctggggaaagcaggtccaaggatggggtctcccagatattttctcccgtgaatccacgatactaagcttgtccaacccttctgactgtgggcgtgagcctggttggggtcgaaaatagtgattaggaggtgcacttgcatcatgagcctattaggaggtgataagaacatgattcatggcggtctccttcgcctggaagggacctttcccccatggcctctgttctttgatctggacagatctggccttctctgtccctccccatcactgcatctcggtcactcagaactgtcactgaggcccattgtggaggcagtgggccaccttggggcagcaacagctttcctggtgggggtcatctctctgggtctctctgctttcccccagaccctgaaccgaccagaggtcctggcacattgcaggggctcaggaaatgctcatggaatgaatggacagagatccccgtctctggg

SEQ ID NO: 94995 - DNA, 42907 bp, Homo sapiens
cacagccccaactccctttgccccccaactcccttcgccctccaggtttgggcatggagaacattggtggcatttttatcgtgctcatctgtggcctcatcattgctgtcttcgtggcggtcatggaattcatatggtccacacggaggtcagctgagtccgaggaggtgaggaggctgggggtgggggtgggcaggaacagggacccccaggggctgaggtgcgtgaagattgtggcattgggagccatacctggagggtggtggggatcgcgagaagggggcagaggaatgcaggaggtggggaagtaagagagctgatggggccagagaatcagcgcgtgaggaagaacaggagggaaagtaggcacagggagcaatgaggatgcagggagaggaggtgagggacaggatgtggggagccacagaggcagaaaagcaagaagaaataagaagagaaacagggccaagtgcagtggctcacacctgtaatcccagcactttgggaggccgaggctggcggatcacctgaggtcaggagttcaagatcagcctggccaacatggtgaaaccccatctctactaaaaatacaaaaattagccgggcatggtggtgcacacctgtaatcccagctactcgggaggctgagatgggaggatcgcttgaacccgggaggtggagattgcagtaagctgagattgcaccactgcactccagcctgggtgacagagggaaccagaagaggacacagccctggactggtcccacactgtgttcaggagggctgcttccatgtccctgggggccgcccagccacacccctgcatttccagacccattcgtgctcttgcacccctggactgctggttccctgcttcccctctctctgtcagcctccagcccttcctccccctcctcacatccagcggctgaccttacatctactccccagaccccagctctgcatccagctgcctgccagtgttctgcacttggcccaaggactcctctgaaggagccgtccatgctgctagtaaaggtgccctccacccgtgtccaggttgccttctcaaggacatccctccggcaagtctgtcctttcctcctgcagcatcagttgtcctctctttattggattcaggccaccaacgtacaaatatgctgtcatttctccagtcttaaaccctctcctgacctcactttccctcccagccaccgcccactttcttcccttctctttacagccttggcagcagtggggggtctccctgatgcttccagtttcttctttcctcccatttcctcttgccccccactccagtctggcatcggtccctgccactccactgaagccactcttgtcaccagcaacttccatgtctgaaattcccggtctcaggcctcatgtatatgaggtagcagtgggcttcggcacagccagtcactctcaatcctcaaagccccttcttccccttctcccacttctccggtcactccttcccaggctccctcgttgggtttctctttctccccaggctctgtttgttgtggggctccagggctcagtccttagactgcttctcttctcggtctttctccactacttcaatgatcccaccagccaaatggctcttaagacccactatgtgctggtgattcttgtgttagttatctattgctatcataacaaatgaccttaacagcttttaaaaagccagcttccattggttcacagtttctgtgggtccagagcctcggagcagcttagctggatgtttctggctgccatgggtctctgatgaggtcatagtcatgttttttggccagactgctgtggtctgaaggctcaacaaagggtggagggttccgttctaagatggctcactgtcccaaatgtccccatgggattttagtttctggaggtggccaagtgacaacatggagaccaatttcattgaaagatgatttttgcccaggtgtggtggctcacgcctgtaatccaagcactttgggaggctgaggagggcagatcacatgaggccaggagttcaagaccagcatggccaacatggtgaaaccctgtctctactgaaaacacaaaaattagccagatatggtggtggacacctgtagtcccaactactcaggaggctgagacaggagaattacttgaatctgggaggtggaggttgcagtgagccgagattgcaccactgccctccagcctgggtgacagagtgagactgtctcaaaaagaaacagaaagaaaaatgatttttattctttaacatttcccaggagaaggggaaacagcttacgattcaccagtttggataatgtcagtggactctgggctataggggctgtccctacttatctggtacctggccccgggttgatttaggtcaggaagaatattggcttggtatgtgagagttaggtaaagggggaggttgggggtatagattggttggtttgcacatgaaaggcagctgagccctctgctatctctaaggcttggctagttctgggaggggtagtctctccccagcctgcaagatgtttaaagtgtcaaaacatcctaagacacagaaaataaaaaacatgatgaatacactcacatggcagttggcaggaggcctcagttcctcagacaaggacctctccaaggactgcttgagtgtcctcacaccatggcagctgagatcccccagggcgagtgatcagagagagcaaggcggaagcagaatgtgcaatggctgaaacttattctgttggtcacacagaccagctctgacacagtgtcagaggggattacacaggggcgtggacgcgggaggtgggatcttgaaggctgcctgccttaacccacaaatatgtgtctcccctgaagccaaggtctgcaacttcagctccacacttggtatctccacttggatatctgataggtgtgcacgtgatgcgatgtgtccaacattgggcttctgcccacctgtgaggcaatttggtccttccagttgctcgggccaaaatattggagctttctttcactattctctctcttccatgccccgtatctgatctcttagcagatcctattggctccaccttcagaatatatccagaatccagacctttctcaggttgctctggtccagccatccctatctcctgcccgggttattgtcatagcttcctccatgagctccctgctcttgccttggcctccctacaatctgttctcaacacagagtgatcctatgaaaacacagcactcctctacctaaagctccccagtgattcccgtctgactctcattctgattttcagaatgaaagccaaaaatccttccagtggtttatgggccttaccagagctggccgccactgctcctttgacctcatttttctgtcttccctgtgcacgcccccctccagccatgctgacctgcttgcagtgcctcagacgtgccaagtcactcccacctgggcatttcggccctgcccggttatctgtccagcaggctggcttcccaggtctccagtggctcaccctgtctttatttaaggatccttctctcagtgaggtcttccttgactgtcctgtctcagaattcatcgtcactccctacccatacaccttaggcctcttcccgattttctttctttccaaagcactcaccacgcctaacacactacatacatgtctgttatcttctgtctctgcacacttgagcataacctccacgagggctgggacttctgtctgtttccttctctgccatatccccagtgctcagaacagtgccgggcacacagcaggccacaggtaaatatgccttgcaataatgaacgcatggatgaggggcagaagatgggaaatcaggaaggaagaactggagaaaatttagagacagtgaaaagaccagaggaaagagaggagcttaggtggaaggtgaagggcagattcaggaacaaacgcagagtagaatggagacattgaagataagtggggagaggtggagaggggaggcagaaaacacgggggagataaagggaagagaagtgggaagggaagcgagggcagaaggaagaaagacccgggcgaggaaaggaggaggaggagtgggatgtggagaggggctgggggaggcgggaggcggactgcgccgggacggtgaccgcccgcgccacccccaggtgtcggtgtgccaggagatgctgcaggagctgcgccacgccgtttcttgccgcaagacgtcgcgttcccgccggcgccgacgcccgggcggcccgagccgggccctgctgtcactgcgcgcggtccgcgagatgcgcctcagcaacggcaagctctactcggccggcgcgggcggggatgcgggcagcgcgcacgggggcccgcagcgcctcctggacgacccggggccccccagcggagcccgacccgccgcccccaccccctgcacccacgtgcgcgtctgccaggagtgccggcgcatccaggcgctgcgggcctcgggggccggcgcgcctccgcgtggcctgggcgtccccgccgaagccaccagcccgccccggccgcggcctggccccgccggcccccgggagctggcggagcacgagtgaccacgggcggggctgtgcgggcgcccggactgaccgaagggacggggcccgccccaggccccagcagtctccgctcccgcagcgggcgcgggacaggacttgtgcgccggcgccccggacgccgcgattttgcctttggttccccgcgaagtccgaggcctggctctggagcccgcctgcgccccccagtggactcgcgagagggtgccgcgggcgagaagggcgcaggaaccgaggactccaggggctggggacttcgggggcggctctgggaagcggaaagcagtcagcggagaggaccccattctgggactgctcaggctccccaagacttgacgcagccccccacgcttctggaggtggggagggcctctggacagatgggtgtcccctggtgcccctccactcttctcttcctctcttttttggggggagaaacctcggaatttctatgagacctcccccagggagggggtcagttgggcccccatccctccccttgccacatcgcagcccctgttggaataaaaaaaagaacaaaaccccagaactggggataccgtctctcatttcctgggggtgtgagggctttggaggcttgggtccccggggcacctgctgagaatcagagtgagcctcgatggttacttccatgctctctccaccctcagccctgcctacaggctgcaggccagcccgggtcccagcagctggcccctctccactgaccttctctcaggacagagggaggctgcgacagagaccctgagacagatggagagatgcagggatctggagacgcggagacaccggaagcggagacacagaaagacagaaaacagatggggctgggggaggggagggccagtgagctgttgagtgtggccgtgcctggggtggcgagtgtgtgcctgggccggggtgattcagtgacgttgtgatcgtgtgtgcacgcatctgcgaggccatcttcaactgtctgtggctgtgatcccgtgtttctgttgaaaatgtacctccccaacccccaagagaggaagtgaggaatcccagtagactggggggtgggtgggcgggcaggggtgggagaggctgaagggctgatggcgcaggagaaaggtgggtccgccttctgtccccgccctccctgccccgccggaggtttctgtggaaactgcagctgaggaaggacgagtgaaggtcacacagcaagagccaaaacgaggccgagcagaaagggagagatggagggatggcgagagacagagatggggagagacaacgaagggggcagagtgggcgggagggggatggggagagagagctagaggacacagagccggcgagacagggagagaggctgggtgaggtgagagaagactggagaaagaatagagggctgagaccagaggtgaagcgggagggtaagatacacccggagttggggtgagagacaggaagccataaaaaactaaatggaacctggaggggactggaacggaaaggaaagcctgactggaaaggtcccagagagagcgaggctgcgcccgttcctgggcggcggcccggggcttgggagctgtccgttcagcacccagttggccagcctgagcccagagcgcccgacttccctccagggcccgcctgcccagcgcagtcctggcaggccggccacaccctgggagacccctccccgcacacagcgccccccgtcgccacccgtccccttctgcgtctcagaccctggttgcgtgcccctcggacaggtgtgggggcaggcaccagcctctctctgttgtctcgcatctctatctccacgtctcttacacactccaatcaatgtctctgcccttgggtcggactctttgtcgaggtgactagaacatgattacagacatttctggtttctcccccttctctgtcccaatgcctcgaggccaattccctctggggtctcccccatttctgagtccccggtcccctaccaggtttctgctcagtctccccctggcctttatctctgagtctccctggtttaccaagcctgtctctgcctggctgtctacgtctctctgtctctgtcaccttcactgaactcttccgttgctctgtctccgtgttctcatctctgcatctgccaatctctgtctgtctttttcaatctgtttgtatccgcctctctctggttctgggctgcctgtttctccctctgtgtctctccttccgcctctcacatctagctcccctattcccctttatccctgtgaccttcccaggtctttccttctcaccgccccccctacttctgcagagcctcaccaggagcacgatgcacagtcatcagtctcatcaggctcgtgcctgaggagagagtgcatgaggggggacgtgagcttgtgtctgaggtgggatgggaagggctcaaggcctcccccggcccagctggagagcaagagcagacagagcctagaatctcctggaatccaggcctcccccacctccccaggcttccccatctccccagtcccattctccatggtccaggcccatgcctctaggccaaggtgtcaagagaaggaaaggaggatatgttgataggctctccctcccctaggaagagggcagagttggggagggggcgtctgggggygaggcatctgggttaaaagatgtggctcctccccctttcccagtctccatggcaacagcccagtctgcaggcccaacctcctttgctgcagaagcagctccctgttaccatggcaacaaaggacagcgagaaagatggggacgggtcagaggacaggattgggatggggctctgggcactggggaaagcctccattcactctctggccttgtctctgtccatatgctgtggctctgaatctctgtgtttctgtgcctctctctggccttcagcctttcacacatttccctgcaccaggtcctcgaccttcacccacccaccctcatacaccaagctcactccctgtcccttgcctgcgtcccccacatctcctatcccataggtggagaggatacccacattctgagaaaactacaaggtcaaatgctctctgtctctctctctctctcttccccttctaccatccccagggagagtctggggtgttcctcatagaacaaagtggtgttggagtgagtggggaggcctcaacttcttgggctccagtggggtggctgatggggtgttgtgtgtcggcagcaggcctggggtgtgggtgccggctgtgcatctgtgtgtgtacatatactgtgacgagctctgtgtgtcatgtgggtgagggcgttggggtgtgtttggaggtgcaacaaagatgtctgcgatagtgctgcaataacgtgatgtgtgtatgtgtgggaggtgtgtgggtgtcgcgtgacttgtgtttgaattattgtgctatgtgtaagtgtgtgcacctttttgtctgtcattcacagttagcattggcaactttgcactgtgggccgttgctcatgcccaaacacactggggagcagtgtgtgtgaggatgtgtgcgacatcgtgggatcatgcaacgatgtccacaaaggctgatgtagtgtgtctggaggcagtgtgaggcctgtgcgtgtgtgatggtgctgagtgcaggtgtgtgttggtttatgggttgcacgatgtgggtttctatgtgagatggtgggaggtcaggtgtggtagagtgtgtgatgtgtgagtctgcgattttctgagtgtcggtgttagtccgcacagcactttgtggctgtgattatgagtctcttgtggtgtgatgggtgtgtaaggtgtgtgccctatgtgtgtttcactctatgtttgagactctgtgtgtggtggggtggtgttgtgtgtgtgagggtacatgctggcctatggtggaatatgagtgcaaccctgtggtgtgtgcgtgtccccagcatctgggctatcagtgtgatggtcctgtgtaactgtgacgctgggcattttctgggcctcctggggccatcctccaccgtgttgtgtctcccgtgtaccctgtgtggttgtggctcattggatagctcaggcgtagtgggggggcacccacagtgagggaatctcagggctcctcccgccagcacccctcctcaattgcaaggcctttcttgctctcttgtgttcccttccaacttcccctcctgcagggccctctccctgaacagcactaccccccgccgtctccagggtccctggtgccacactgcagtgattcaccgggcttccctcccaccccgtgtcactacccgccccccctcccccagcgtacccttctcggtgatggcacacccccacaatgagaggatttccggggttttctttccctgagcgccccttcttggaggccctactccatattgagggggtctccaagtcccctattgcggaggtctctgggaatccccccacccccgcagcgctcccccttcgcggccgcgccgccactttgcggagcccaaggggaggacagctgcagtaccaggggcggggccgcgggccgtccgtcagcacggcggsgcccctgattggccagcgccgcccccctcccgcggacgcgggcatatgaggaggcggaggcggcggccgccgcagcctctgtgcggtgggaccaacggacggacggacggacgcgcgcacctaccgaggcgcgggcgctgcagaggctcccagcccaagcctgagcctgagcccgccccgaggtccccgccccgcccgcctggctctctcgccgcggagccgccaagatgggggtaggtgctgagccggctgggcgccgcttccgtgtgacattgtggggccggtgacattgggtgtgcgcggggggcgggggcaccgggacccctgcgctccggggccaggcctgcgagacccggggagccggctgacccagccaatccatgtggtcgtggggccgcagggggcggcggggggtctgtggcgcacgttggcatggctttgtgtgcggagatccgcgaggttgtgggccagccctcagcatctccgcctgaccttgtgcggttgcatgtgcacagttgcatgtgcgtatgagagctgctggctctgtcaggccctggcagcgagtgtgtgggccccgtggtgtctgaaagtctgcgatcgcgtctgggtgtgtctgtgagagctcgtgttagtgcgtctggggttattgaggcccccctgcttccctggcagggtgcggataggtccacgttgtgggatggacaccagatgacctctctttctccttccaggcctggatggggggactccgcagtgtgtgtgtgtgtgtgtgtgtgtgtgtgtgtgtgtgtgtgtgtgtgtgcaggctccgcagtgtcgcagcctggggctgcagtgtgtgtgtgtgcagcccctcatgtaggggagcaggcatgggaggctgggaggaggagaggaacaggagagccacggtggggagactgagtgcacagctgagggtgtgcgtgtgcaactgtgtagtggggagcgtgcatgcctggctgtgtccttgcctctgtgtccgtgtgtccttgtctgtctgtgagtctctccagcagatgccgcctccctccctggctgaccacctgacccttgctgcagccctggattcctccctgtgtgtctggggcggggctgaagggagggggaatcaggagaggagggggtgggtgggggtaggtgggatgaagagggcgggagaggccagtggagggagaataggagggctggggagaaagatggcggataaaggctgatgggcccagggatggaggtgggggatggggctgcagatctgtggggtggggcagggtgggccggggggctgggaaggaggattgggttggggcaggactaggggagagaagggagaaaggggtagtcagtgatggctgtcaggtaagtgggatggagggagggaagctgtggatggattgggagaagactgatgctaaaagccctagagaaggaagttagagggaggtggtcttaggaaacggagtggggacgagaggagaaatgaaggcagcttagacatgggaaggaaagacagagacacatggaaagacagagatgctctgaaagagacagagaaagagacatggacatagagacaaagagacagagacaagcagagagacatggctgagacacatggagagacattgagagagaaaatgagaaactgaggctcagaggaagagacacaaggacagatatttcctatctagcggcaaccacagtcagcctgagggacaggaagaggaggcagagggcaaagggggaggtcaagggagggatggtcagagatgtgggccaggtcccctgcgagggggaagggaggccggcccaggcgcagaggctgcgggagctggcaccagatcagggagaggcggacagcatggaaaatggcaaggagctgcagaggcggccacagcgagacaggcatggtccccacccttggaggtgctcccaccccgcagcgcgcccatctgggcctcctgccttgactgggaaagcctcagctgtgcactccaacagatgggagcctgctccccaagggggtctggctgtgtcaagggcaagcaggagccaaggccagggccagggtgagccaggagtcccagggtcccggtccctcctccctcagaccaggagtccaggccccagcccctcctccctcagatccaggagtccaggccccagcccctcttccctcagaccaggagtccaggccccagcccctcctccctcagaccaggagtccaggccccagcccctcctccctcagatccaggagtccaggccccagcccctcctccctcagatccaggagtccaggccccagcccctcttccctcagaccaggaatccaggccccagcccctcctccctcagacccaggggtccaggcccagcccctcctccctcagacccaagggtccagccccagcccctcctccctcagacccaggagtccaggccctggcccctcctccctcagacccaggattccaggctcccagtccttcctccctcagacccaggggtccagacccctgcccctcctccctcagacccagggatccaggaccccagcctctctcagtatctgagagtccggcccagcccttagcatttatggggccccgagcatcagctcccagccttcaactaaggtttctgggtgggcagctgattttctccctctctctctcctgacccccatctcacccctctcctggcctcctgcacaggacttgaccccaggcctttgtagctccacatctctccatctctccatgtctctccatcctgggtctaccccatcgggcaaagctgagaccaccccggcactgtagggcagtaggaaagatggtctccccgtcccccaagcctctgtgcctccgcatctgagacgcagtgctgctgcagggctggcgtggggccaagcctccctcccaccccctgcaccccttcttgaggctcccagatctccaggctgctgcccctccctgcacacccccaccctccgactcagcctctgggtctgggggcagacagcaggcagctcaggccctctacaaggtcacgaggagattagcgctgagccgcgctgagcctccgatcccagcttggccctgggcctgcgggacctgtcagcggcccctgcagcacccagcctcgccccacccctcccaccagcctcggacactgccctccccatccgcccaggctcccaaactggaacttcagggactcacaccatgcgcagttcaagccaggactagggcttctgcctctaactctcctgctctgtcctccaggaacctggccatgcccagcctctgttaaggacgctccatgggcccaacacatggaagatcccagagagaggcagagacagagatagaggaaggtaccagagggagacagtgagagagacagagacagagagacatagacagagatagagaggcagattccagagacagagagaggagatctcagagagacagaaatagagaataagatcccagagagaaagtgagagaaagagacagagagagagaggaagatcccagagacagacagcgaaagagagaggaagatcctacaaaaagagacagatatatatatatatatatggacagagagagagagaaagagagagagagattgaggagagcccagagagagacagtgggagaaagagagacagagaggaaaattccaggatgaggtagtaagagagagaaagagaatgagagatatatggggaaggagggggacggaagatttgagagagacagagagagggagagagagaaagagaatgagagatatatggggaaggagggggacggaagatttgagagagacagagagagggagagagagaaagagaatgagagatatatggggaaggagggggacggaagatttgagagagacagagagagggagrgagagagagagaaagagaaagagaggagatcttagtgatagtgagagagaaagagagattcagagatagagaggagatcccagagagagagagtgggagagagacagagataggcagatcccagagagagatattagagagacagagagagagacagagagaggttgaaacaggaaaagagacaggtagggagagatgtgagcatcccagaggagacagcttgagagatgaagatagagacacaatgacagagagagacagaccgaaagacggaaaaagacagagacagaaagtactgatccttgagacgccaactcagagggaaataagaacccagagagacagaaactcagccagacctggggagacacagccaagagatggagacagacatcatgcaaggcagagagacaaagaaccagagatcagagagagacaaaatcatagaaagacacatgcagagagacccagagactgggatcaggatagagaatgacagagacaacataaagagatcagagcgatagagagagagagagagctatcaagagagagaaacagccttgcaaagacagagatacagagatggagagataaagagacaggagacagagagatgatgaaacaaagcaataagaccaagagccaaaaacagacctggagatacacatcaagggagacagacagaggagaaagagatggagatacacgtggagacatagaaaagacagatacgaggccgggcacggtggctcacgcctgtaatcccagcactttgggaggccgagacgggcggatcacgaggtcaggagattgcgaccatcctggctaacacagtgaaaccctgtctctactaaaaatacaaaaaaatgagccgggcgtagtggcgggcgcctgtagtcccagctactcgggaggctgaggcaggagaatggcgtgaacctgggaggcggagcttgcagtgagctgagatcatgccactgcactccagcctaggcgactaagcgagactccgtctcaaaaaaaaaaaaaaaaaaaagacagatatgtaggaaggttggacagggccagggagagggaagaagagacagaagcagagttaaaatgtcacatagaggtggggcacggtggcttattcctataatcccaacagtttgggaggctaaagcaggaggatcgcttgagtccaggagttagagaccagcctgggcagtgtagtgagaccccatttctagaaaaaaattaaaaattagccgggcgtggtggcacacacctgtagtcccagctacacaggaggcggaggcgggaggatcacctgagcctcagaagtcgaggctgcagtgagctgtgattgctgcactccagcctgggcatcagrgtgagacattgtttcaaaaaacgaaaacaaagtcacatagacacagaacacaaaaggggagagccccgcaaagatgggcacagaaacagagagagactgaaacacaggcagaagccagacagggaccttcggggacagagactcagagacacacagaaccagagacagggaagctgattgcagcagatgagactcacgaggcctgagagtcaccagaggcagaagggaggtgaagtcacccagaggctccgggagacacagggagaccccgagaggcagacagagaccccccacccagagatgcaggggcaccggccaggaggatagctggggcatggagggccggtgtcctcctggaaccccttctcgcccgcagtctggtggctctgacagctatcgtatcgccacctcgcaggacaagaaagatgacaaggactcacccaagaagaacaagggcaaggagcgccgggacctggatgacctcaagaaggaggtggctatggtaagcctcgccctctgcccgcacaccctcccagagaacctcgccagttcttggctggcctaggcactcaccgtctcccccaaactcctgttcctcagacagarcacaagatgtcagtggaagaggtctgccggaaatacaacacagactgtgtgcaggtgtggccaggctgtgggctgggaccctgggaactagggaggaggagctgggggctaggacccctgggtctgagggaggaggggctgtggctggtgtcttaagttctgggggtctggtgaaggcctggggtgccagggttgcccagggagggttctgtgtgagtcctctgtccctcagggtttgacccacagcaaagcccaggagatcctggcccgggatgggcctaacgcactcacgccaccgcctaccaccccagagtgggtcaagttttgccggcagctcttcgggggcttctccatcctgctgtggatcggggctatcctctgcttcctggcctacggtatccaggcgggcaccgaggacgacccctctggtgacaacgtgagtgcctggaccctgccctgtgcaaggctctgcacatttatttacggacaccgcaccccaacttcttcccatccctctaagcttttcacagcccactctccccctttttcccatctaactcacaatcacccagcaagagaaccagatcaaatacaaggcaaactgaggctcagaaaagccaggctacttgtccaaggccccacagcaggatgtgtgagccggggctctgtcccaaggctgtgtgacctcagcggccttgagaacagacaccagcaggtggtcatggcttgacagatacccagagtgagtgtcacatagagacccaggcacaccccgctgctgatacatcagggcccatccccataacacagggacacattcgagatgcagcctcagatcccatgcgcataacacagaccacacaccagccacacagagctgctcacctgggtaggcgtgtgtgcacacacacgcatgtgcacggagggtcaacgcagatgccacaccaggatgtggtttcaaacatggccacctaattcagaaacacagacacagactcagatatacactgacagagaaactcacacacacactgacacgcacacacacacacagcaatgcaggcataacctggtgacagagagacatgagagtcaggcacagagagtgtcctcagatgttcaaatctaaacagtcttagacataagctctcacagagaggcagagctggagacacagagacagagatccacacacagagaaccaaagaagctgccttgtagaatgtaaagtcaggcatgcagccagtcagacagacacatggacagacagccgcatcccagactcaacatgtgcaggaggacagacacacacacaaaacagatggacaagtcgggcatggtggctcacgcctgtcatcccagcaccttgggaggccaaggcaggagggtaacttgagaccaggagttccagtagcctgagtaacatacccagacagacccagcctctaaaaaaacacaaaacatagccgggcctggtggcgcacacctgtagtcctagctactccggaggctgaggagggaggattgcttgaatctgggaggttgaggctacagtgaactgagattgtgccactgtactccatcctaggcagcagagcgagaccctgtctcaaaaaaaaaaaaaaaaaaaatgccaggaaagatggctcacacctgtaatcccagcactttgggaggccaaggtgatagatcacaaggtcaggagatcaagaccatcctagccaacatggtgaagccccatctctactaaaaatacacaaaattagccaggtgtggtggcatgcacctgtagtcccagctactcaggaggctgaggcaggaggatcgcttgaaccaggaggcggagattgcagtgagccaagatcatgccattgcactccagcctgggcgacagagtgagactctgtctcaaaaaaaaaatcgacagacccttagattcaaacacaaccattacagaaagagggactcaagcacaaacaggggagactcagacacaccaaccctcataaccaacctagggtcagacacacaaatacagacccccactgacacaaagctcccttcccagactccaggcgagcagggactggtggagagtggcttgggcggcccctgatcaacatccccacatctccccacagctgtacctgggcatcgtgctggcggccgtggtgatcatcactggctgcttctcctactaccaggaggccaagagctccaagatcatggagtccttcaagaacatggtgccccaggtgaagggtgcccagcaaggggccagacgggggtgttagtgtatgggctgggggccgggcccagtgacccccaggcagagggagtctgggaggtgacattactccatcccacctcagcaagccctggtgatccgggaaggtgagaagatgcaggtgaacgctgaggaggtggtggtcggggacctggtggagatcaagggtggagaccgagtgccagctgacctgcggatcatctcagcccacggctgcaaggtgggcctgggcctagggcccggctttaccctccctcgggctgcccaggagctcaggcccagcccctcctccctcacactcaggagtccaggtcccaacccctcctccctcagacccaggagtccaggcccccaggccctcctccctcagacccaggagtttaggccctgggccacctcctcacccaacagtcaggagtccaggcccagccctcacctttcggagatccttagggaccctagaccttggccagcagcactgtgccttccccaccttcaagatcccagcctctggcctcccacacaccactcacccactgggcacccaggcttctagctgtgatctccaggcacacaggcttcagccccaagccctgtacacaaataccctcctgtcccaggccctggactgaaccctctctctgctgcacctacccccaggtggacaactcctccctgactggcgaatccgagccccagactcgctctcccgactgcackcacgacaaccccttggagactcggaacatcaccttcttttccaccaactgtgtggaaggtgaggcgggtgcagagaagacacacagctggggcagacacagggatgtgtcccagggggtcaggcctccagaacctccctgagccaccccacctcagcctaacccctctggcctgcaggcacggctcggggcgtggtggtggccacgggcgaccgcactgtcatgggccgtatcgccaccctggcatcagggctggaggtgggcaagacgcccatcgccatcgagattgagcacttcatccagctcatcaccggcgtggctgtcttcctgggtgtctccttcttcatcctctccctcattctcggatacacctggcttgaggctgtcatcttcctcatcggcatcatcgtggccaatgtcccagagggtctgctggccactgtcactgtaaggccaggctcctgggtctgggtggggagggcctgggggtctgggctcctgggtctgagggaggaggggctgggatcctggacccctgagtctgagggaggaggggctagaggcctggacccgtgtgtctgggggaggaggggctgggatctggacccctgggtccggagaaggggctgggggcctggatcacagtattcttgtgaaagacaacttgggcctgactcagagggcctcattaacaaagcaaacaatcaaagaaagaaacaaacaaaaatcttgagaaacactggcaagccgtaaagagccaacaatcctattgcaaaattaagaagtgcacgctcatgatgaaaagttgaagagtacatcaagttaaaaaataaaataatgaggctgggtgcactggctcacgctgtaatcccagcactttggggggccaaggcgggcagatcagctgaggtcaggagttcaagactagcctggccaacatggtgaaaccctgtctctactgaaaatacaaaattagtggggcgtggtggcacatgcctgtaatcccagctactcaggaggctgaggcaggagaatcgcttgaacctgggaggcggaggttgcagtgagccaagatcacgccattgcactccagcctgggtgacaagagtgaaactccatctcaaaaataaataaataaataaataaaataaaataataagcctggcgcagtggctcacgcctttaatcccaacagtttgggaggctgaggcaggaggacygcttgaggtcaggagtttgagacaagcctggacaacatagtaagaacccatctctaccaaaaaatgtgaaggctgggcgcagtggctcatgcctgtagtcccaagactttgggaggccgaggcgggtggatcacctgaggtcaggagttcgagaccagactggccaacatggcaaaaccccatctctactaaaagtataaaaattagccaggcgtggtgatgggtgcctggaatcccagctactcaggaggctgagacaggagaatagcttgagcctaggaggcagagcttgcagtgagccgagatcgtgccacctcactccagcctgggcgacaaaagcgagattctgtctcaaaaaaaaaaaaaaaaaaaaaaaaatttttttaaattagccaggcgtggtggtacatgtctgtagttccagctatttgggaggctgacccgggaggttgaggctgtagtgggccatgattgaaccactgcactctagcctgtgtgacagagggagactccatctcaagaaaataataataataataatwattataataataataattattattattatttttaaaaattttttctctggctgctttgctgccagcttcaccccagaagtccattctctgtgaggttccgcctgacagctgtgagcatattgactaaatgctgtcttcaaggtgcatggcagggactatcttagaaataccattctcctctttcattctttgacttaatgttttatgtgaagttttccatattagggccgggcagggtggctcacgcctgtaatcccagcactttgggaatccgaggtgggtggatcacttgaggtcaggagttcaagaccagcctggccaacatggcaaaaccccatctctactaaaaatacaaaaattagccaggcgtgatggtgggcgcctgtaatcccagctacttgggaggctgaggcacaagaattgcttgaacctgggaggtggaggttgcagtgagctgagatcgagccactgcactccagcctggacgacagagcaagactgtgtctcaaaaaaaaaaaaagtttactgttttccatattagcaatgttgaatgctaccctatgtcaaatggatttttatacgcaaaggattaagcatattgtgagcacatagtctgatgatttggggcaaactgaacacaatcacgtcagctgcaacgagactgcgtctccctgaagccccctcaagaccttatttagcccctgccccccaacccaagggtaacccctgatctggctgctaacagcatagattaactttgcctgtgttcaaacttcctattaacggaataattcagtatgaactcatttctggctctttttggctgaacatgtttttgacgttcacccatgcaggtgcaggcagcagtaatgtatttgtttttatcaatgttagtattccattgtccacaatttatcttttctgctgttagtggacatttgagtagtttgcagttttggacaattttttttttttttgagttggagtctcactctgttgcccaggctggagtgcagtgtcacgatttcggatcactgcaacctccacctcctgggttcaaggggttctcgtgcctcagcttcccaagtagctgggatgacaggagtgtaccatcatgccctgctaatttctgtatttttagtagggatggggtttcaccatgttagccaggctggtctcgaactcctgatctcaagtgatgcgcctacctcggcctcccaaagtgctgggattacaggcgtgagccactgcacctggctgttttgcactattatgcatgtggctgctatgagcattctagtccctgtctttgggtgtctctgccctgtttctattggtctgaattgggggtggcattgctgggtgctgcctcattcttttccaggccctcaggattctctgggggctgggcagctgggctgtggccctcgtgtcgctcatccaaccctgctgccgggcttgtccctgtaacttgcckgcccttgctcgtcctccaggtgtgtctgacgctgaccgccaagcgcatggcccggaagaactgcctggtgaagaacctggaggctgtagaraccctgggctccacgtccaccatctgctcagataagacagggaccctcactcagaaccgcatgacagtcgcccacatgtggtttgacaaccagatccacgaggctgacaccactgaggaccagtcaggtgagcgcaggccccgggtgaggaccatgggggcctggctccaggagtccctggccctcacacatgcctcccccagggacctcatttgacaagagttcgcacacctgggtggccctgtctcacatcgctgggctctgcaatcgcgctgtcttcaagggtggtcaggacaacatccctgtgctcaaggtgggttcagctactggcctcacctcggccctgcctgtgtcctcccctcagctgtccctgttctgacaaccctttctccttgcagagggatgtggctggggatgcrtctgagtctgccctgctcaagtgcatcgagctgtcctctggctccgtgaagctgatgcgtgaacgmaacaagaaagtggctgagattcccttcaattccaccaacaaataccaggtactctgggctttccgggagagccagcctggacctcaggttccttatgacgcctgtaaagaggtgtcatagagcsttgattttcccgtctgtaaratgggaatgataatacccgcctggtggggagaggaacagggagagcttgagagtgggagccggatctctgttggagtgagacgctgaggagtaaagatcttcctgcaggccaggcgcggtggctcacacctttaacaccagaactttgggaggctgaggtggggggatcacttgaggccaggagttcgagacgagcctgggcaagatggcaaaaccccatctgtacgaaattttttttttaattagccaggtgtggtggtatgtgcctgtggtctcagcgatttgggagtctgaggcaggaggattgcctgagccggggaggttggggctgcagagagcctacatcacgcactgtactccagcctgggtgacagagcaagaccctgactcaaaaaaaaaaaaaaagttttcctacagcagagagtgggaacaagcaggagacctcttggggcagagcagcaactttaaattattcagcaaactttttttttttttgagacagagtttcgctctgtcacccaggctggagtgcagtggcgcgatctcagctcactgcaagctccacctcccgggttcacaccattctcctgcctcagcctccagaatagctgggactacaggcgcccgccaccatgcccagctaattttttgtatttttagtagagacggggtttcaccgtgttagccaggatggtctcgatctcctgacctcgtgatctgcccgcctcagcctcccaaagtgctgggattacaggcatgagccaccgcgcccggcctcagtaaacttttttttgagatggagtcttgctctgtcgcccaggctaaaaggcagtggtgtgatcttggctcactgcaacctctgtctctgggttcaagtgattctcatatctcagcctcccgagtagctggaattagaggcgtgcaccaccacacccagctagtttttgtatttttagtattgatggggtttcatcatgttggccaggctggtcttgaactcctgacctcaagtgatccacccacctcggcctcccaaagtgctgggattacaggcataagccatcatgcccggcccattcagtatacattttttgaccagccaccacatgttaggccctgttttgggtgctgggtgtacacacagtagtgagtgacatggtgaagtcacccctctctgagacttacgctctggttctagaagacagacaataacaaaggcatgaggaggtaatcgtagtggttgtggtgctgagggagggaaccctgcaggtgtctgggggaagagcgctccggtagcaggcacagcctgtgcaaaggcccagaggcgggagtgtgctgacgcatctgaacaccagccagccagccagtgcagaggggctgggagccagggagcgtggtgggggtggtgggtgctggccagatcctgtcaggccccacgggcatggagaggacttggctgtgactctgaggagcacacaagcctccagggggctctcagccaaagagagacaggagttgactcagagcttttaaaataactttattaagatataattaacataccatagctcgtccctctaagtgtataatttaatagttttagtatattcgcagatataggcagccatccacatagtcaattttagagcattttcatcacctccaaaaagaaaccccacatctctcagctgtcacccgccccctcctccccgacactcccagccctaagcaaccactaacctactttctgtccgtatggttttgcctattctggacatttcataaaaatggaagcatacagctgggtgtggtggctcacgcctgtaatcccagcactttgggagaccgaggcaggaggatcgcttgaactcaggagatggagaccagcgtgggcaacatagggagagcatgtctctataaaaaattagccaggcatggtggtgtggacctgtggtcccagctacgtgggagacygaagcgggaggatcgcatgagcctgggagatcaaggctgcagtgagctgtgatctcgccactgttctccagcctgggtgacagagtgagaccctgtcttaaaaaaaaaaaacagggtgggaggaggggagcacagacgtggtggcttatgcctgttatcccagcactttgagaggccgatgagggcagatcacttgaggccaggagttcaagaccagcctggccaacatggcaaaatcccgtctctactaaaaatacaaaagttagctgggtgtggtggtggtgcctgtaatcccaagctactccggaggctgaggcaggagaattgcttgaacccaggaggtggaggttgcagtgagctgagatcgtgccactgcactccagcctgggcaacagagcgagactctgtctcaaaaaaaaaagaaaaaagaaaaaaagaaaaagaaaaagaaatatatatccatgacatagacagagcggacaggaatgagcagaggtctctgtgagagagtgtgggggagccctggtgtgggcctatcctggcacccgtggctctggacaggggacaggatggggcagggagcttcctggtgtctgcgtggctcaggcacgccaccctctgatcggtccccagctctccatccatgagaccgaggaccccaacgacaaccgatacctgctggtgatgaagggtgcccccgagcgcatcctggaccgctgctccaccatcctgctacagggcaaggagcagcctctggacgaggaaatgaaggaggccttccagaatgcctaccttgagctcggtggcctgggcgagcgcgtgcttggtgcgaggctgccgggcgggctctggggtccctggagggcaaggagggttgtgatgctgcccaaagcctgtctcagcccagggcctcccagaatatactgtaaatgaatgaatgaatgaatgaatggatggatgagaggggaaggtatcctaggaaatgaatgctgactggccgtcttgctgatggggagatggaatgcgggcgatgcagacatctaggggcatggggcggaggttccgaggctgggaccctcacaccccaacccttccctgccactaggtttctgccattattacctgcccgaggagcagttccccaagggctttgccttcgactgtgatgacgtgaacttcaccacggacaacctctgctttgtgggcctcatgtccatgatcgrcccaccccgggcagccgtccctgacgcrgtgggcaagtgtcgcagcgcaggcatcaaggtgtggcttggggtggctgggggaggcaaagccaggcgtggggcgggagaggccatccctaaaaaacaatgcctgcaggtcatcatggtcaccggcgatcaccccatcacggccaaggccattgccaagggtgtgggcatcatctctgagggcaacgagactgtggaggacatcgccgcccggctcaacattcccgtcagccaggttaacccccggtgagccacccatcccagccagggccctggacatccctctagggtgttgacacagggggaccgcttccccccaacctccctctgcactgcctgtcccattctttctgggactcctccatggaccaggccctgggtctggccctccctccggtgtggggacattgcagccacagaggtagccaggcataggtttgcatcccagcctttattttattttatttatttatttatgtttttgagatggagtcttgctctgtcgcccaggctggagtgcagtggggcaacctcagctcactgcagcctccgcctcccgggttcaagcaattatctgcctcagcctcttgagtagctgggattacaggggccctccaccatgccccgctaattttttttttttttttgtatttttagtagagacgggggtttcactatgttggccaggctggtctcgaactcctgacctcaggtggtccacctgccttggcctcccaaagtgctgggattacaggcgtgagccactgcgcccggcctgcattccagcttataccgctcacaagctgtgtgacattgggcaagtcctttagcatccatgaacttcagtttgcccatctctaaaatgggctactaataattcctatctcagaggattcagtagaatccagtacttctgtgtctgtctctcttttttcctgtctgtctgtcattgtctctcttttctgttctgtttttctgacttcttcaactttcccatcctcatacctatctctgactctgccttccttcagcttgtccatttatctccgttcctctgaatccactgtgtcttggctgggcgcagtggctcacgcctgtaatcccagcattttgggaggccgaggtgggtggatcacttgaggtcaggagttcgagagcagcctggccaacatggcaaaaccccatctgcactaaaaattaaaaaaaaattagccaggcgtggtggtgggcacctgtaatcctatctactagggaggctgagacaggaaaatcacttgaacccaagaagcaaaggttgcagtgagccgagattgcgccactgcactccagcttgggtgacagagcgagactccatctcaaaaataaataaataaataataaataaataaataaataaatccactgccccaaagtccttcctcaggtctgcccgcacgccctgctgcagtagcccccttctcccctgcttctcccagaggcctcttcccccagcccctggtcctctggctctcctggttgtggggctggcccctctgtttctctgtctttcagggatcactttgccactcctcacacaccctgacctcagccatcgctctctctgctcttcccagggatgccaaggcctgcgtgatccacggcaccgacctcaaggacttcacctccgagcaaatcgacgagatcctgcagaatcacaccgagatcgtcttcgcccgcacatccccccagcagaagctcatcattgtggagggctgtcagagacaggtgggctgcgctcccgcagaggaggggacggggccttgactcctgggtcctcactgaggccggggcctggtttcctgggtctgagggaggaggggctgggggtctggacccctgggtctgagagaggagggtctgggggcctggactcctgggtctgagggaggagggggctggggacctggacccttgggtctgagggagggggcctggacttctgggtatgagggaagaggggataggggcctgaactcctgggtctgagggaggagggggtgggggcctggacccttgggtctgagggaggaggggctgggggcctggacccctgggtctgagggaggagggtctgggggcctggactgctgagtctgagggagaaggaggctgggggcctggacctctgggtctgagggaggagggtctgggggtctggacccctgggtctgagggaggaaggtctggaggcctgaactcctaggtctgaggggaagaggaggttggggacctgaacttctaggtctgaaggaggagggggctggggtcctgggcttctggatctgagggaggggactctggggactggcctctgggtgtcatccttaccctctctccctccagggtgcaattgtggctgtgaccggggatggtgtgaacgactcccccgctctgaagaaggccgacattggggtggccatgggcatcgctggctctgacgtctccaagcaggcagctgacatgatcctgctggacgacaactttgcctccatcgtcacaggggtggaggagggtgagttggccaggggtggccctggagaccagggtcactaccggaggcctgagaccagcaaggggaactggccagggctgcagggggatgtgtggcagagaccacaggccccctggccctggaggagcctgagcctgtccttttctgtcttcctcccctgtggggtcgggagctcccctgggcaggactgagctgacacacttcagggtccctgcgtcatccagcccaggccccatctggtgggtgaagctgacttggaggctttttaaagatattctcagccaggggcggcagccacgcctgtaatcccagcactttggaaggctgaagcaggcagatcatgaggtcagaagatcgagaccatcctggctaacatggtgaaaccccgtctctactaaaaatacaaaaaattagccgggcattgtggcggttgcctgtagtcccagctactcgggaggctgaggcaggagaattgcttgaacccaggaggtggaggttgcagtgagctgagattgcgccacagcactccagcctgggggacagagcgagactccgtctcaaaaaaaaaaaaaaattctcaagcccaaccagggggaagccagggaccctgggggataccccctctgccagcctgggctgggggtcaagggagcttcccagagtggacagggatggmtgagccaagtcaggggccatgctgtgacgtccacatagactagtgccagggagtcgcaggcagaggaaccggtacacaggcaaggcggtgtgaggggctgggtctgaggctggtgctgctgagccgacaggcaccacctcctgacaggcccagacaaggccacagaagggttggttcacattcagatttattttgatcatcaaattaattcatgataatcatagacaaatgcagaaaagcattcaggaaaaaagtagaatcacccgtaacctcgccatccagaaataatcacggttcatgccttggtggattttcttccaatttctctctcctatttgaaatgtctctggtgtaaaaagtagttcatggtaaaagagaattcaaacggcaaagccgagcccagagtaacagattaaatgtcctcagcccttgtctcctatatcccagaggaaaccatggttaacaccttcttatctcccaagagacatctttttttgggggctgggggcggggatagagtctcaatctgtcacccaggatggagtgcagtggcacaatcacggctaactgcagcctccacctccgggacttaatcgatcctcctgcctcaggcccctaagtagctgagactacaggtatgcaccatcacacctggctgatttttaagattttgtagagatggggtttcgccatgttgcccagactagtctttctttttttttgagacagagtcttgctctgtcacccaggctggagtacaggcatgcaatctcggcttactgtagcctccacctcctgggttcaagcaattctcctgcttcagcctcccgagtagctagaattacaggtgcatgccaccacaccaggctaatttttgtatttttagtagagatggggtttcaccatgttagccaggctggtcttgatctcctgacctgaagtgatccccgcaccttggcctcccaaagtgctgggattgcaggggtgagccacctcgcccagcgaggtcttcaactcctgggctcaagcaatcctcccaccttggcctcccaatttgctgggattacaggcatgagccaccacgcctggcctccccaagacatctatgcatacacagtacacacactgtctcagatacagccgtctgctccttccgaatcttgtgcatcatgctggaagcctgggaggcagctgtgagcagagcagacaccatccctgttctcacagggctggagagacagccttaaacaagttaacagatatgtaattacaaattgtgatatatgccccgaagaaagcaggccgctgtgatagataatagtgagggtcctgcccagatggggtggacagggaaggcctctctgaagtgagggaagaaatacctaacttccgtcaggggccaggcacgggggctcacgcctgtaatcccagcactttgggagaccaaggcgggaggatcgcttgagcccaggagttcaagacctgcctgtacaacaaattaagacctcaaagatcaaaaaattttaaaaattagcagggcgtggtgttgcacacctgtagtctcagagacttggggggctgaggcaggaggatcacttgagcctgggtggtcgaggctgccatgaaccatgatggtgccactgcactccagcctgggatagagcgagatccgagaccctgtctcaaacaaacaaacaaaataacttccaacgggggcattccagatatacccaaaagtaaagcaaaggcacagtgggcccctgcgcctccatcccacctgcagcggcagtcagcacacggcacaccttgtttcttccccaccacctggaacacacactggattatgctgatgcacatttgtcaccatttcatccataaatagtttaggatgagaaacccctagtttgtggagaagagcacaatgcagggaacgagaatatcaggtgggagcggcccaggcccttattgctatgcaagagacatcaaagcaatcaaagaagccacaccacaggcagcctgcttcaccttcccttccctccctccctcccttcctccctccctccgtccctgcctgcctgcctkccttccttctttccttccttccttccttccttccttccttccttccttccttccttccttccttccccttccttccttccttccccctcccctcccctcccctttttttgatggagtcttgctctgttgccaggctggagtgcagtggcgtgatgttggctcactgcaacctccacctcccagcttcaagcgattcttctgcctcagcttcccacatagctggaactacaggcacacaccaccactcccagctaattttttgtgttttagtagagatggggtttcaccatgttggccaggatagtctcgatctcctgacctcgtgatccacccgcctcagcctcccaaagtgctgggattacaggtgtttgccaccgtgcccgcctgttctttcttaatgattgacctcattgttcatgggctaatctttttacttatttatttatttagagacaaggtctcactctgttgcccaggctggagcgcagtgctgcaatcatcagtcactgcaacctcgacctcctcaagtgatcctcccacctcagcctcccaagtagctgcgaccacaggctcgagccaccgtgcctgactaatgtttattttattttattttatttttttgagatggagtcttgctctgttgcccaggctggagtgcaatggcacaatcgcggctcactgcaacgtctgcctctgaggttcaaatgattctcctgcctcagcctcccaagtagctggggttacaggtgcccaccaccacgcccagctaatttttgtatttttagtagagatggggtttcatcatgttggccaggctggtcttgaactcttgatctcaggcaatcctcctgcttcggtctcccaaagtgttgggattacaggtgtgagccccagcgcctggcctggattaatctttattttgtttactttagacaacctgtactggttgaatatttattgagatatggcatgcatacagtgagttgggcatattatatctcattaaaatattcaaccagacagggtgtataaatttttacacatgtacacagccatgcaaccaccagaccccagtcaagatagaaaaccattccagccccccatttaggttttgtctgctctcttccagtctatatccctcctcctagacataaccattatcctgacttttagcccagagacgggtgctgagcctgctccagttggagttggatgctaagaatgcttttgtgtctggctcgtgtcactcagcacgggatccaaggtccagctgtggagttgtgtccgtagctcgccccttcttgctgtgtagtatttgactgcatggatgtaccgtggtttattcatccctcacctgttgatggacatggggttgactctggcttttggctctgatgagtggtgctatggtgaacattctcgtacttgcttttcgctgggcataaacagtcctcctctcttttgggtataaaacctaggagtcggattactcggtcggtggggtgggggatgtttgatagcaactccgaaaccatcttccaaagtggttatttcaagaatgtttccacaaaggcgatgtggttggatgtttatgtggaaaggtaggtgggtgaggggccaggtgtggagacttatgcctgtaatcccagcacttcgggaggctgagatggaatcacagcccagaaattagacaagcctaggaaaagtggtgagactctgtctctactaaaaatacaaaaattagctggacgtggtggcgcgtgactgtagtctcagctacatgggaggctgaggcaggaggatcacttgagcctgggagtcgaggttgcagtgagccgtgatcatgccactgcactgcagcctgggcaacagagtgagaccctgtcccaaaaagaaaataatggtgggtgggctggggggtagaaaaggacgctggacaggccgggcgyggtggctcacgcctgtaatcccagcacttcaggaggccgaggagggcagatcacgaggtcaggagattgagaccatgcaggctaacacagtgaaaccccgtctctaataaaaatacaaaaaaattagccgggcgtggtggcaggtgcctgtagtgccagctactcgggaggctgaggcaggagaatggcgtgaacccgggaggcggagcytgcagtgagccgagatcgcaccactgcactccagcctgggcaacacagcgagactctgtctcaaaaaaaaaaaaaaaaaaaaaaaggacgttggatgagggcagaggaggggcagagggagtggggctccctggcatgggcgcctgctctgagcctgcctgtgccacaggccgcctgatcttcgacaacctaaagaagtccattgcctacaccctgaccagcaayatcccggagatcacgcccttcctgctgttcatcatggccaacatcccgctgcccctgggcaccatcaccatcctctgcatcgatctgggcactgacatggtgagccctggcagccacccttggggcccaggagggtggagtcctcccctctccggctcacccggcctcctccgcctaggtccctgccatctcactggcgtacgaggctgccgaaagcgacatcatgaagagacagcccaggaacccgcggacggacaaattggtcaatgagagactcatcagcatggcctacgggcagattggtgaggcaccggggactccatctccttaccacccagtgccgggcctagagcagtgcctggcccaccgtgggtgcttgggaccctggcattgactcaggggagcagacgtgggcaggaccaaccagtgagctatctgwggggggggtctgcaccccatccttctccacctcctcctctctgctgttgatgtgtgcggatccccagaggagtggagcagccacccttgggggctgtcccagcaagcagagacttcatggcagtggttccaggcccagggaggtcattcctgcgtagggagctcaagctggggatcccccaagaattcatgatgtttaggtggcctaggtcaggtgagagaggggctccaggttatccctctgggagagccctctctccaaagcccctgtcccaggtggcccacccatctcagggcctcaccaccaagtgagacctcaggtcaccctctgggaaccaatgtccagataacagggccaggagggcatactcccctctccaaggaggcctccgggccctctgaggtgccctgggttggctgctggccccaatctgagcctctcctcggcttcctctctcctccttccaggaatgatccaggctctcggtggcttcttctcttactttgtgatcctggcagaaaatggcttcttgccyggcaacctggtgggcatccggctgaactgggatgaccgcaccgtcaatgacctggaagacagttacgggcagcagtgggtgagtagggcagggtgctgtgtctctgcccaccrtaagatccccggggtgagctgttccagccatgcatggccacttcctacgatggccccctcagtctcccatggcagcatcaaggcctttgctgggcacctggggcttcctggatgcccttggcccagcccatctggagccttgtgtcccactgctggagctctctgccctgccaggccttcttccccacctctgtctgtcccttcaaagcccagttgctgtctgtcctccttgggaggcccacagggtccttatcctcctccctggcccctggtggatggtgagatcaccattaacctttcttcttccttgtacgtctcctgactcctccctcgggactatgagcccgcagaaggaagacacacctgaggccctgaggaccccatgcaggatggggcggggcaaagagcaccggaacgtcggggtggcggctagggctgcagtgccactaactgacgtcccgtgccctggtcaccgctcctgcagacatacgagcagaggaaggtggtggagttcacctgccacacggccttctttgtgagcatcgttgtygtccagtgggccgatctgatcatctgcaagacccggaggaactcggtcttccagcagggcatgaagtgagggccgggggcacatggtgactggacagccatctgtcctgtccgagtgtctgtctgtctgtgtacttcctcttgtgtccttgctttggttttttgttgttttgttgaggcagggtctcactctgtcacccagactggagttcagtggtgtaatcatagctcactgcagcctcgacctcctgggctcaagtgacccacccacctcagcctcctgagtagctgagactacaggtgtgcaccatcatatatggctaatttttatttatttatttagagacagagtcttgctctgttgcccaggctggagtgcagtggcacaatcttggctcactgcaacctccgcctcccgggttcaagcgattctcatgcctcagcctcccaagtagctgggattacaggtacgcaccaccaggctcggctaatttttcgtatttttagtagagtttcaccatgttgcccaggctggtctcaaactcctgagctcaggcaatcttcctgcctcagcctcccagagtgctaggattacaggtgtgagccaccatgcccagcccattttgggttttgccactgcactgattttctctcaaggggtcctgtgtgtcctagattctctctcagcctctgtgtgtgtggtggaggtgcccctggccttttctttttataccagtgcctctctgtgtctgtccctgtctctgtgtctgtttctgtccctgtctctgtgtctgtccctgtgtctgtctgtctgtccctgtctgtctctgtgtctgtccctgtctctgtgtctgtccctgtcttttgtctctttctgtgtcaccatcgctctgcctctatctttgtctctctctgtcggggcatgtctccccatctctgtctctccctatgtctctgcctctctgtctctgtgtctgtgctgctgtctctgggtgtctgcactgtgcctccccctrtctctgcggggtggcaggtgcagggtgggtgctctctgggcccagccctgcccttctgtgcctccaggaacaagatcctgatcttcgggctgtttgaggagacggccctggctgccttcctgtcctactgccccggcatggacgtggccctgcgcatgtaccctctcaagtgagtgccccgctgcccccagccctgcccacaccagcgcctgccatggagccttcccttagactcagcctgaacctcaggccccacctcccctggtgtccccactgcagtccccattctgatgcccccgagcctcccccataggctgctcccaccacggattactccgaagaccccaggccccagccccgcccagggcaccctccacctgtgagcacgaaggatcctgggagactgcccctctgcgycccctccagtcccctraaactctgcctctcgttagggcccygcactcaagccctcctgctctcccctctgcaggcccagctggtggttctgtgccttcccctacagtttcctcatcttcgtctacgacgaaatccgcaaactcatcctgcgcaggaacccagggggtgagggagctcggcaaggcagccgaggggggcggggggcagcagggtctcaggcagctggtcccaggctcccctcgccctgctggatggctctgccacctggttcccactcttctctctmttcccatctctccgggcacccactctgtcttctcacgggtctctgtctgtgtggtttccttgtctctctccctctctgtccctctctctgctgggcggctcgccttgcctgtctctctccatctcttactctgtctctttctttccttctttgtctctccaggttgggtggagaaggaaacctactactgacctcagccccaccacatcgcccatctcttccccgtcccscaggcccaggaccgcccctgtcagtccccccaattttgtattctggggggaggagccctctcttcctgtggccccaccttggcccccaccccctccactatctcctgccgcccccactctggctggcttctctcccctgccccaaacctctctcctctctcttttctgtgtcagtttctctccctctcctcacccctctatccattcctcccgccccagccacctccctgggctcttttttactccccttcagccccccggctgatgccatctctggttctggacaattatcaaatatatcagtggggagagagaagcggtgtgtgtgttgtgcctgctttccagacggggactgcggctgggacagcatcccctctgttggggcgcgctgccaggcgactctcgaaactgcaggaacttagcctggcactggcttggaagtcacggaatctcagagccatctaatcacggagttttcaactccacgaaagtcagagcagcttgaattcaccaggcgatggcattgtggaatcagaacaggggagagggagggaagcagacgtgggatggtgactgggagcctctcctataggagtaggacccaggggacacaatgacgatgatgatggtgatgacagtgattcactgagtgcctgctatgtgctctgcccacttttaagtgtgcattaaatgtgcacagagagaagaagtgatttgcacacagctaagaagagacaaatctgggatttgaaccaaggctgtccaaagttctaggtcactacgctattctctctttttattgagataaactttcatacagtgaagtgcacgcatcttaagggtatagctcaatgattttaaaaattgcatctgcaggccaagcgcggtggctcccgcctgtaatcccagcactttgggaggcccaggcgggcgggtcacttgaggtcaggagtacgagaccagcctggccaacatggcgaaaccccatctctacgaaaaatacaaaaaaaaaaaaaaaaaaaaaactgggcgcagtggctcacacctgtaatcccagcactttggaaggccgaggcgggcagatcacaaggccaggagatcgagactatcctggctaacatggtgaaaccccgtctccactaaaaattaaaaaaaaattagcctggcgtggcggcactcatctgtaatcccagctacttgggaggctgaggcaggagaatggcatgaacctgggaggcggagcttgcagtgagccaagatcccactactgcactccagcctgggtgacaaagcgagactccgtctcaaaaacaaaaaaacaaaaaaacaaaaaacttagctgggcatggtggtgcatgcctgtaatcccagctactcaggaggctgaagcaggagaattgcttgaacccgggaggcagaggttgcagtaatccgagatcatgccactgcactccagcctgggcaacagcgagaacccgtctcaaaaaaaaaaaaaaagttgcatctgcaaagctaccacccacatcaaggcatagaacctttccctccacccagaaagttcactggagcccctccagtcgcctcccctccagaggcaagagctgatctggtttctgttaccacacatcagttgtgcctgttcttgagcttcatacaaatgaaatcttacagcatgtgatctctgtgtctggctccttgttctcagcattatgtctataggagtcatccatattgtcacctgcatctgtggccccttccttttcatcccattgtgggactataacacaatttgtctattctcctgttgggggacttaggggtttccagtttggggctattacaattggtgctgctagggacaggaacatcctagtcatgtcttttttttttttttttttgaaatggagtcttgctttgtcacccaggttagagtgcagtggcaccatctcagctcactgcaaccttcacctcctgggttcaagcgattctcctgcctcagcctcccaagtagctgggattacaggcacctgccaacatgcccggctagtttttgtatttttattagagactgggttttgccatgttggccaggctggtctcaaactcctgacctcaagtgatccgcccaccaacatggtgaaacgccgtctctactaaaaatacaaaaactagctgggcgtggtggcatgtgcttgtaatcccagctactcacagggctgaggcaggagaatcactggaacctgggaggtggaggttgcagtgagccgaggtcacgccactgcacttcagcttgggtgacagagtgagaccccatctaaaaagaaaaacaaaaaacaggcacggtggctcacgcctataatcccagcactttgggaggctgaggcaggcagatcacctgaggtcgggagttcgagaccagcctgaccaacatggagaaacccccgtctctactaaaaatacaaaattatccgggcatggtggcacactcctctaatcccagctacttgggaggctggggcaggagaattgcttgaacccgggaggcggaggttccagtgagctgagatcgagccgttgcactccagcctgggcaacaagagtgaaactccatctcaacaacaacaaaaaaaaagtgatccacccacctcagcctcctaaagtgctgagattacaggcacgagccactgcacccagccctctagttatgtctttttttttttttttttttttgagacggagtctcgctctgtcgcccaggctagaatgcagtggtgcgatctcggctcactgcaagctccgcctcccgggttgacaccattctcctgcctcagcctcccgagtagctgggactacaggcgcccgccgctacgcccggctaattttttgtatgtttagtagagacgaggtttcaccgtgttagccgggatggtctcaatctcctgacctcgtgatccacccgcctcggcctcccaaagtgctgggattacaggagtgagccaccgcgcccggcctttcttttttttttttttttttaagacggagtctcgctctgtcaccaggctggagtgcactggcatgatcttggctcactgcaatctccacctcccgggttcaagtgattcctctgcctcagcctcccgagtagctgggactacaggcgtgcaccaccacgcccagctaatttttgtgtttttagtacagacggggtttcaccatgttggtcaggttggtctcgaactcctgaccttgtgatctgcccacctcggcctcccaaagtgctgggattacaggcctgagccaccgcgcccagccctctagttgtgtcttttaatgacagatgtgcactctgttgggtacacgcgtgcctgggagtggaattgctggttcatgggatagaccatgtttagctttcatggacgttgccagaccctttccaaagttcaagtgccattctgcatccaacagtgtaaggaagcagcagctgctccacatccttcctccactgggagttgtcagtccttttcatttttgccaccttggtggggcagtgaatccatttccctcgaggcagccttcctaacacagctcagggaggcaagtcagaggaggggctggggccaggcctgggcctgcctgcctcccaatgccagtgtctgtggccaggatgctgagagtgagtgtgagtgggtgagtgtgcaagtgcatgtacacacccactgcacaagacaatggatgagggagaaactcccgaatctgagggggaaaggcagttggagggcaggggccatgtgcgctgggcacccctggtgaccccagagtacagcctggtcctggtaggggctacatgagcccagacctctcctaggaaacccacacatactgtttaatttttctggtgcaggggaagagacgctcccatagacaggtggggagactgaggcccagagacgggagggctttccttgaggtcacacagcagggacagtgacccacatttctggctgaatgtgctaaggtcttcctgctttcccagcaccgcttccttggggatcccaggagggagggaggagtcctcaggctggaggcacccatctttttcttttttttttttttttttttgagatagggtctcgtacagtggcacagtctcagctcactgcaacctctgcctcctgggttcaagcgattctcttgactcagcctcctgagtagctgggattacaggcgtgcaccatcacgccgagctaatttttttttgtatgtttagtaaagatggggtttcaccatgttgggcaggctggtctcgaactcctggccttaagtgatccgcccatcttggcctcccaaagtgctgagattacaggcgtgagccacacctggcctgggactcacaatcttctcaggtgccccctcatctcccagcacaccaaccccctacccccctaattcagggcccatctgccaaaggccccttccctcagggaccccatttctcaccatctcatgatgtctctgcctcaggccctcctctcccacattacccctgtgtccaggtcccatctcctgaaattcccttattcaaagtccccccccaccctcccactcctaggacccctcctgcaatgtccttgcccctcagactccactgtccccctccccgtctcttgccatggcctgcgctgttcgacacctccaggcctctgcctctatgttctctgctcagaacaaagaccagtgggttttggaatgaaattgctttcattcagttcctataaggaaacccaacagctctcataacaaaagtccatcctgaatctcctacggcctgccaccaaagaggcagctggagctctgtcccaattctattccccaagctctgtctttcggtggaggttcttccaagggctacctctgctgctttggccctttgaattcagatgctgctcccctattcctgctcggggctaattgtgctattgcactcctcctttggtgttttctgttttgttttgttttgtttttttctgagacagggtctcattctgtcgcccaggctggagtgcgatagcacactcttggctcactgcaacctccgcctcctgggttcaagtgattctcctgcctcagcctcccgagtagctgggattacaggcatgtgtatttttttttttagtagagatgggcttttgccatgttggccaggctggtgttgaactcctgacctcaagtgatccaccctcctgagcctcccataagtgctgggattacaggaccacgcccagccccgcagtcctcctttgattttcaagtttgaatcctatttagaaaacctgattccaggccaggtgtgatgggtcacgcctgtaatcccagcactttgggaggctgaggtgggcagatcacgaggtcagagtttgagaccagcctgaccaacatggtgaaaccccgtctctattaaaaatacacaaattagctgggcatggtggtgcacacctgtaatcccagctactcaggaggctgaggcaggagaatcgcttgaacccgagaggcggaggttgcagtgagtagacattgtgccactgtactccagcctgagcaacagagtgaaactccatctcaaaaaaaaaaaaaaaaaaaaggaaacctgattccactaaaagcctgggggtgacaaagaggaaataaacagtaactagccaatctgatcttcaaagtgtaactcttccatcttcagtgtggggcccttgcaaagggcttccctgcctattgcgccaccagcccctcagacagggccatcttcctcccacctcctgggaacaccttccagcaggcctcaaagcacaaaccctaaactgctgtagatcttggaagacaagagctgggcctaaaagagtcacttggggccaggcgcagtggctcacacctgtaatcccagcactttgggaggccgaggcgggcaaatcacaaagtcaggagttcgagaccagcctggccaacatggtgaaaccccatctttactaaaaatacaaaaaattagctgggcatagtggcgggcgcctgtaatcccagctactcgggaggctgaggcaggagaatcgcttgaacccaggaggaggtggaggttgcagtgagccaagattgtgccactgcactccagccctggcgacagagtgagactccgtctcaaaaaaaaaaaaaagtcacttgaacctgggcatggtggctcacacctgtaatcccaatacttgggaaggccaggcagaaggatcgcttgagtccaggagtttgagacctactgggccaacacagcaaaat

SEQ ID NO: 94996 - DNA, 18515 bp, Homo sapiens
tgcagataagtcaaggggagtagcaaagtgaatagggagggctgggcgcggtggcttatgcctgtaataccaacactggggtaggccaaggcaggccgatcacttaggccaggtcactttagaccagcctagccaacatggcaaaatgctgtctttactgaaaatacaaaaattggccagccgcagtggcccatacctataatcctagtactttgggaggccaaggcaggcagattacctgaggtcaggagttcgagaccagcctggccaacatagtgaaaccccatctctactaaaaatacaaaaattagccagacgtggtggcatgcacctgtaattccagctactcaagaggctgaggcaggagaatcacttgaacccaggaggtggaggttgcggtgagctgagatcatgccattgcactccagcctgggcaacagagcaagactccatctcaaaaaaaaaaaaaattagctgggcatggtggtgcacgcctgtaatcccagctactcaggaggctgaggcaggagaattgcttgaacccagaaggcagaagttgcagtgagtcacgattgtgccactgcacttcagtctgggcaatagagtgagactccatctcaaaaacaaaacaaaacaaaacaagtgaatagggagatgttttggggtgtggtgggaatactatttagaatgaccagatgaggccaggcatggtggctcaaatctgtaatcctagcactttgggaggctgaggcgggagtatcgcttgaggctaggaattcaagaccaacctgagcagcaaagtgagaccctcatctctacaaaaaataaaaataaaaattagctggatgatgccaggtgtggtgactcatgcctgtaatcccagcactttgggaggccaaggcgagcagatcacttgaggccaggagttcgagaccagcctggccaacatgccgaaatcctgtctctactaaaaatacaaaaattagctgtatgtgatggtgcgcgcctgtaatcccagctactctggaggctgaggcaggagaatcgcttgaacccaggagacggaggttgcagtaagccgagattgcgccactgcgcttcaacctgagtgacagagtgagactctatctcaaaaaaaaaaaaaaaaaaaaaaaaaagctggattcggtggcccacacctgtagtcccagctgctagggaagctgaggtaggaggatcacttgagcccaggagttggaggttactctgagctatgattgcatcactgtgccccagcctgggcaagagagtgagaccttgtctcttaaaagagagagagaagatgagagaaaataagtgagcagagagagattggaaaaggtttggtcagataaggaatcacaggggtaagatgaagtcgaaggagtcacagctaatgggaagataagccaggaaacagagagaggctattaggaacagggacatggggaaacagttaaaagatggagggtgagccgggcgcggtgactcacacctgtaatcccagcactttgggaggccgaggcgggcggatcaccaggtcaggagatggagaccatcctggctaacacggtgaaaccccatctctactaaaaataccaaaaattagccgggcgcggtggcgggcgcctgtagtcccagctactcgggaggctgaggcaggagaatggcgtgaacccaggaggcggagcttgcagtgggccgagatcgcgccactgcactccagcctggatgaccgagcgagactccatctcaaaaaaaaaaaaaaaaaaaaaaaaaaaagatggagggtgggggccaggcgcagtggctcacgcctgtagtcccagcactttgggaggccgaggtgggtagatcatttgaggtcaggagttcgagaccagcctgggcaacatgtgaaacctcgcctctactaaaaatacaaaaattagccggcgtggtggtgaatgactgtaatctcacctactcaaagaggctgaggcaggagaatcgcttgaaatcgggaggcggaggttgcagtgagccgagatcgcgccactgcactccagcctgggggacacaacgagactctgtctcaacaacaacaacaacaacaacaacaacaaaagatggagggtggtgaaggggtcatgagattggagggatttgggggaccagaaagtgattctggacggagaaatccaggggtagacgaggtacaggggaatgcagaaagtggaaagagatagtagagaaagagaagcaggagagggagagcagcaagagaagtctggaaagcctgagaaaacctcaagagaacaggaagggagacagaggcgcgatcagggacagggcctgatcacaaaggaagggcctagggtaggagaggaagcatggtggccagccgcggtagggcagggtgggcagagtgaagggagtggggtacggttggcaggagcagggtgtgggaagggcacctctctcgccccaacgaaccccggcccttcccacttcacgtagctgtggggcgcaatggcttcttttccgcggtgaccccagctctcgaagtcacctggcgctgttccgggcctcgggctcccccacacgcatgcgcgtgccctttccatgccctttggcttcgtggctctgagaggacggaaacctagcggcgcgtgccagggaagcgccggttatagcccctcccctcccagcctcaatttcagaaatctccctttcttggtctcagcacctcccagccctcaattggctgtgaggttcactaggtccgcccccttcctgaatgctgattggttcagatagctatcagcggtctttcgagggctagttgagaccaggcgtgccaaagggaagaagggtcatggtagcccccatgcacagctgtcccccaagcagccacagacataatccctagaaaacttatacagttggccgggcgtggtggctcacgtctgtaatcccagcactttgggaggcagaggcaggaggctggcttgagcccaagagttcaagaccaccctggacaacatagggagaccctgactacaaaaaataaattagctttgggcgtggtggctcacgcctgtaatcccagcactttgggaggccgaggtgggcggatcacgaggtcaggagatcaagaccatcctggctaacacggtgaaaccccgtctctactaaaaatacaaaaaattagccgggcgtggtggcgggcgcctgtagtcctaactactcgggaggctgaggcaggagaatggcgtgaacccgggaggcggagcttgcagtgagccgagatgcatttcagcctgggcgacagagcgagactccgtctctaaataaataaataagctgggcgcagtggctcttgcctgtgggcccagctacttgggaggctgatgcaggaggatcacttaagcctaggaggtggaggcagcagtgagccatgatcacgcccgcctgagggagacggcaagaccctgtaaaagaacaaaaattaggccacatgcattggctcacgactgtatattcagcgactcagcaggctggggcaggagaattgcttgaacctgggaagtggaggatgcagtgagccgagatcacaccactgcattccagcctgggtgacagagaaagactccatctcaaaaaaaagttagtgtagtgttgtgattcatagctaggcttggtttaaatgcccaaaatggcacaactgggctgtgtgaccttggaaatgtttgtaactggtcagacttagttttctgacctgtaaaattgggttggtaataaaactaccttcctcatttggttgctagaaggataaactagaccaatatgtctaacttgaaatgggcctggtgaatgaagaatgcctggaagctttgtttctcactaagctttgcttcaggaactgctccaacttatcctctaagactttatttttaaaaatttttttctcggttgggtatggtggctcacgcctgtaatcccagcactttgggaggccaaggcaggtagatcacgaggtcaggagatcgagaccatcctggctaacacagtgaaacctcttctctattaaaaatacaaaaaattagccgggcgtggtggcacacgcctgtagtcccagctactcaggaggctgaggcaggagaatcgcttgaacctgggaggcagaggttgcagtgagccgagatcgcgccattgcagtccagcctaggcgacagagcgagactctatcaaaaaaaaaaaaaattctctcttatatcactgacttgaaggcataattaagacttttttcttttcttttcttttctttccttttctttttgagatggaatttaaatctgtcactgaggctggagtgcagtggcacagtctgaactcactgcaacctccacctcccgggttcaagcgattctcctgcctcagcctcccaggtagctgggactacaggcgcagaccaccttgcccagctaatctttgtattttttaatagagatggggttttgctatgttggtcagactggtcttgaactcctgacgccaagtgatctgcccacctcagcctcccaaagtgctgggattataggagtgagccaccgtgcctagctgattatgacttcttttttggagacagggactcactctgtcacccaacctggagtgcagtgacaccatcatgggccactgccacctcatctcccaggctcaagctatcctcctgcctcagcctcccaactaactgggactacaggcacttgccctttttttttttttttttttttttgagacggcgtctcgctctgtctcccaggctgaagtgcactggtgccatctcggctcactgcaagctctgcctcccaggttcacgctattctcctgcctcagcctcccaagtagctgggacaacaggcgcctgccaccacgccccgctaattttttgtatttttagtagagacggggtttcaccgtgttagccaggatggtctcgatcctgacctcgtgatctgcccacctcggcctcccaaagtgctgggattacaggcgtgagccaccgcgcccagcctttttttttttttttttttagacagggtctcactgtgttacccaggctggtctcaaacttctgggttcaagcgatcctcgcacctcagcctccccagtagctgggactacaggcatgcatcactgcacctggctccctcagactttatttgtttgtttatttttgtaattaagacagagtctcgctgtgtcacccaagctgggccactgttgcccaggctgggctgcagtggcgcgatctcagctcactgcaacctctgcctcccagactcaagcaattgtcctgcctcagccttcccaagtagctgggactacgggcgtgtgctgccatgcctagctaattttttttttttttttgtatatttagtagacacgtggtttcgccatgttggccaggctggttgacctcaagtgatccgaccatgtcagcctcccaaagtgctgggattacaggcatgagcctccatgctggcctccctcagactttaaaatcaagctattccacgatattccccaaacctaataagaaagtgattacctgtgtcttttctttctgcttgcccattcttcattatctttcagacccagctgagatactactcctaggaaacccatagtcctcagagtccttctcctcttcctccccagaggtccctgtctctccctcaaacacaactttgacacccctacacctctgtgtctggatctgtctccctaaacacattgggacaaggtcaggagctgacccactcatttactactcattcagcaagcacttgtggaataaccactgtgtgcccggcccagttccaggaaagtggattgaaaacataaacacaatgaataacactcatctctgtctcagtatcaatccacctcgaaggaatgaatacatgggaaggtcccacctggagtgaggctacaagaacatgaccaggacgtttagcagggagtgagccccccacctggtcccagagaagagggagatctgagaagacactgaggtctgagattaatttggggcagcgttgggggagaggcgcgaccctaggtggccttggctatggatgtaggtttcagagctcagacatacccagttggcctgtgggtttagagagagtgtagaggctgcagatctgcaagatgatctgccggagggacgccagactggacctgagccctggaggcgtctctaatttcctttctctttctgcaccttcttctaccctccaagcaggtcctatggtgtcttgaatgcaaagatatgtagtttatatgttatgccacgcgcgcgcacacacayacggtgttttgagtaggggtcctgtgatgtcttgaatgcaaagatatgtactttagatttcaacacacacacacacacacacacacacacacacacacacacmcccacggtgttttgagtaggggaagcccacgagtagataggctcactaaagccctggcgcggccttagagtggctccttagaagggagcctcgaattttcacattttgtcatcttccttttctgtcccccacatcagtagaaaataggagcgtcccccccagccaggtgcattcgagccaccccttcaagggaatataagaatggactcgtccactcgctcccctccccccaccacgtgaatgggtcacccccccccccgcaacagtaggtggtcccttccgcacatttcactctgtacagcaaatggtttcttcccatttgctagacagagggctagattttccccgcccactctcgactcttcaggtagttcgcccctccccgtgaccggtgggtggtttctccctcctccccgcctcgggagctggatggtctcgcctctccctccccccaccccgtgccgggtgcgcggcctgggagtcagcggcccgagcgggaagcgccgggcgagcccactgtgcggccgtcgtgggggaagcgaaggttcctgattccacctacctcctaagtgaaggcttccgtccctggagaggaggcggcgccctgtatcggccttcgtcctccgcgggtgtgctagcgttgggacggtcctttgttgccgcgaggggtaggagtgggcgtggcggagccagctcsgttcggaacactcccgggccgacccgactcgctcatcctgcaggagctgcggcgccaagatgagtggagaggagaacccagccagcaagcccacgccggtgcaggacgtacagggcgacgggcgctggatgtccctggtgagcgttcccacctgggatattgaggagtccgggggcgcggggggtggctcaggagaacggctggttcgtgccactctcactacctgattgggaaactgagggcagttgaggaggcgctgcctaagggagcagggcggggcgggccctggagcgtgcatgccattgactccctctcgcgcgctcccgcagcaccatcggttcgtggctgacagcaaagataaggaacccgaagtcgtcttcatcggggactccttggtccagctcatgcaccagtgcgaggtgagggcagtccctctccccctgccccatccagccctgtgtccatgctgacacatctggaccagaacccaggccaggtgaggtattatgagagtacccagattggcctcaggcagcccgaggctctgagaatcttggtgtaaggtgcaacattctattgagaaagaaatgtatgccttggttttatcagattggatttgtgtataatgtactaagacctaaaatgaggctttcctgccataggcttgcctaaagtgaggctctttcttgtttgctttaagtagtgcgcagccctgttgggtttacacaaagctatagtcactttacaggaagcgaagggcaactctaatggcactccacaaagaggactcaatcataataatatctttccacaaagcatgtccaactgtaatgggtttcatcaaaataagtttcaactgtaatgccattgattcaatgcatggctcaagcagactggattttcatgaagtgagtcttgcttctatggggcttggtttgttttgttggttggttggttggttggttggtttttgagacagggtcttgctctgtcacccaggctggcgtgcagtggtatgatctctgttcactgcaacctctgcctcctgggctcaagtgatcctcccaccttagtctccgagtagctgggactacaggtgcacatcaccatgcacctggctaatttttgtaatttttgtagagatggggttttgccctgttgcgcaggttggtcttgaactcctgggctcaagcagtccgcccacctcagcatgagcaacagagcctggggcttggtttaaagtgagagactctaggcagggtgtggtggcttacgcctgtaatcccagcactttgggaggccaaggcaggcggatgacctgaggccaggagttcgagaccaccctggccaacatggcgaaatcctgtctctactaaaaatacaaaaattagctgggcatggtggcacatgcctatagtcccagctacttggcaggctgaggcaggagaatcgccagaacctgggaagcagagattgcaatgagccragatcgcactactgcactccagcctgggcaacaagagcaaaactccgtctcaaaaaataaataggctgggcaccatgggctcacgcctgtaatcccaccactttgggaggccgaggcaggtggatcacctgaggtcaggagttcgagaccagtctggcccacatggtgaaaccccatctctactaaaaatacaaaaaattagctggacgtggtggcgtacacctgtagtcccagctactcaggaggctgagacatgagaatcacttgaactagggaggcggaggttgcagtgagccgagatagtgccagtgcactccagcctgggtgacagagtgagactctgtctcaaaaataaaataactctgtctcaaaaatataaaataaaataaaataagtgagagactctaatagatttctataaagtgaggttcagccatgctggagtttgctccaggtaaaattttaagactgcttccatgaagtaaggttcttccataatggcatttggttaacacctggacagagggggatggtccatgcggacagtgcccttgtgcccctaccacttcttgcccacaccacttcttgcccacagatctggcgcgagctcttctctcctctgcatgcacttaactttggcattggtggtgacggcacacagcatgtactgtggcggctggagaatggggagctggaacacatccggcccaaggtgagcggggcttgggtggggctctaaaacatcttttggctgccccctcaccgctgcttcatgtctctttttccacagattgtggtggtctgggtgggcaccaacaaccacggacacacagcagagcaggtgactggtggcatcaaggccattgtgcaactggtgaatgagcgacagccccaggcccgggttgtggtgctggtgagaggctgggagagtgggaaaggaagaatggcagtggtctgggaccccctcagatatagccacagttggcacagttctaggcagcttgacatagagcagtggcttttaggcagaatctcacgttggagcttgctatacccttcagagtggctgtggttgagaatatgctccgagaccaattagccttttttgcccagggatggcttaagactttgggggtattgaaaaactaaaaaacgggccaggcacggtggctcacgcctgtaatcccagcactttgggagaccgaggcaggtggatcacgaggtcaggagatcaagaccatcctggctaacacggtgaaaccccatttctactaaaaatacaaaaaaaaattagccgggcgtggtggcgggcacctgtagtcccagctaacttggcaggctgaggcaggagaatggcatgaacctgggaggcggagcttgcagtaagctgatactgtgccactgcactccagcctgggcgacagagcgagactccgtctcaaaaaaaaaaaaattagttgggcatgggctgggcgcagtggctcatgcctgtaatcccagcactttgggaggccgaggcaagcagatcacctgaggtcgggagttcaagaccagcctgaccacacgtggagaaactccatctctactaaaaatacaaaattagctgggcgtggtggcacatgcctataatcccagctacttgggaggctaaggcaggagaatcgcttgaacccaggaggtggaggttggggtgagccaagattgcaccattgcactccagcctgggcaacaggagcgaaactctgtctcaaaaaaaaaaaaaagccgggtgcggtggctcacgcctgtaaacttgtaatcccagcactttgggaggctgaagagggtggatcacaaagtcaggagatcgagaccatcctggctaacaaggtgaaaccccgtttctactaaaaatamaaaaaattagccgggcgtggtggcaggcgtctgtagtcccagctacttgggaggctgaggcaggagaatggcatgaacccggggggcggagcttgcagtgagccgagattgtgccactgcactccagcctgggcaacagagcaagactccatctcaaaaaaaaaaagaattagctgggtatgatggtgcgcaaaacctgtaaccccagctacttgggaggctaaaggagaaggatcacttgagcccaggaattcaaggtaacagtgagctgtgatcatgctactgcactctcgcccgggtgacagagaccctgtctcaccagaaaacaaaagaaaaaccctcaaaaaaccttgaataggccaaaagttgtcaggcattcctggggtaaatctaggctccatcacttgtaggtagctaggatatttcctcttctgaaaacggattgatcccttggcatgagccatgatgttgatatcttttatttatttatttattttgggacagagtcttgctctgttgccaggccagagtgcagtgacgcaatctggcctcactgcaacctcctcctcctgggttcaagtgattctcctgcctcagccttcacagtagctgagactgcaggcgcgtgccaccacacctggctaatttttgtatttttagtagagatggcatttcaccatgttggccgggctggcctcaaactcctgacctcaagtgatccacccgtctcagcctcccaaagtgctgggattacaggcgtgagcaacctcccttggcctatttattttttgagacaggatctggctctgttgcccaggctggagtgcggtggcatgatctcagctcactgcaacttctgcttccagggctcaagtgattctcccacgtcagcctcccgagtagctgggactacaggcacacgccatcatgtcccactaatttttgtgtatttttgttagagatggggtttcaccatgttgcccaggttggtctcgaactcctgggctcaagcgacctatccagctctgcctcccatcatgctgggattacaggcgtgagccactgaacctagccaatgtcaacatttttctaagtgatacttggaaagaggctaggccgcgcatggtggctcacgcctgtaatcccagcactttgggaggccgaggcgggcggatcatgaagtcaggagatcgagaccatcctggctaacacggtgaaaccccgtctctaataaaaatacaaaaaattagccgggcatgatggtgggtgcccgtagtcccagctacttgggaggctgaggcaggagaatggcgtgaacctgggaggcggagcttgcagtgagtcgagatcgcgccactgcactccagtctgggcgacagagcaagactctgtctcaaaaaaaaaaaaaaaagaaaacgaaagagggtaaaacccagaagtctcttgctaaatgagggctaggatgtgatatttaggaactaccctcccaccctccccacttgcccatccctagtgttttctgcagctggaaacttcatggtggtgggtggaggacaggttggcacagagaacaagatactcaaatgcttgtttccttactacgcctcgtgttcctgctcagggcctgcttccgcgaggccaacatcccaacccacttcgggagaagaaccgacaggtgaacgagctggtacgggcggcactggctggccaccctcgggcccacttcctagatgccgaccctggctttgtgcactcagatggcaccatcagccatcatgacatgtatgattacctgcatytgagccgcctgggctacacacctgtttgccgggctctgcactccctgcttctgsgtctgctggcccaagaccagggccaaggtgctcccctgctggagcccgcaccctaagcatcctgctgccttcccacaacattaaactctccttcctcagtgtgctgtttcctgctttatggtcgaacctgtctgggtatctgggtaccaccattagtccttatcctgatctgtgaccctgcagttctgcaaggtgttttttgtgtgagacagggtctctctccgtcacccaggctagagtacagtggtgagaccacagcccactgcaacttcaacctcccaggctcaagtgatccacccacctcagcctcctgaatagctgctactataagcatgtgccactaggtccagcttattgtattttttgtagagaagtggttttgccatgttgcccaggctgatctgactcctgagctcaagcaatccacctgcctcggcctcccagggtgctggcattacagacatgagccaccatgcctggctgtggttctatttctgcccagggcaggtatcactgatccattaaggcactgtgattcttgtggttaggttaatttccactatcacaatagtgtgcttcaggcaggcgttaccaatcagtaaacactagttaagaccagctttccagcactatcctacaggaccaagctcaggcaagaattctgggaacatagtgacccagtgcatatgcggttgccctggctggaacttcctggtgctccatctctagcttagatgccacttctgtggaggtgtcctgaccctcccactcctagttgtcatccctccacacagggtgtaggtatcttgtcacctcaggtgggcactgtgtccacatgctgagcaggaggggtgtcacccaggggaggttccttcaagcccagttgcagtgcaggcccaggccacatgggggcagcaggggtcacactgaggaccaagggtattccaggtagactaggctccctcccacccactgccacctctgggctaggacctcttgggacctgtttcctgagtacgaatgaccccagagccagtgagggtaaaccatccagtggcatcttgcctcaggccttccccaaactcacgcagtccaatggctgagaacagggccagcaggcattgaggctcccggagcgcacaggctcctaaactggagaggggccatctggtccacagcaagtcagggacctggcctatggggttcctctgaagttgggggcagtggtactggaattgttgcccccacctcatggaaagcctaccgctccatgacaactcaggacaggactggtacaaccaacagccctccctgttaagagcctacagccacacaggtgtgttaaacagctttaatctcgctcattgcggcttctcggcacagtaagaaatattgcacatgatcaacatgttttgttctggggaagggggcaagggcagggggaatcaccttcttagaaagtacaacccaagttgggagggcagagggggtgaggagaaaaccctccccgtgcctgtggcaaagtgcaggagcccccacccccaaactaacctgagtccagcccctctggggaaaaaaggggtgcatgaactccccctattccacaggcgcctccctgtggcccaaggcctgcaccaccctccagcttgcagccctcacaggagccattttgcataaagtgaaaagctctgaaggtcacacgctccaggttatgtacaggggcttggaggagggagactgcccctgcagcccctcagctgccccccagcaccgggagggagcttcgagggaagggggtatttacaagaggagcaggcctcattccgccccaaactggagaggacgaaatggctttacccgggaggagataaccttcctgcccccacatactgtccatgtcctgagggggtactataagtcctggcatcttctcaggggtccctcacctgcctgtggcagctgtggagggacctgggggtgggggggagggctggggagccccctcccagccaggctgtccaggccccgactctgggggtggaggcagtggcggggcagcctgggccgtgccagagtccgagctgggtgaggtggggtcagggccccctgcggggctgggagtgggggcaggggcagcagcggtgccagtggggggcggtacagggagaggagcctcagctccagggggctgctccgtgggagtggcagcctgcatgatcttctggcgcacctcacggatcttcaactgcagacaaaccttggagggaaagatgtctgcatagcgggcctggaaggcggctgtggcctgggctggagatagaaaaacggtggggagcacaggatgagatgtacagataagtcccacccgagtgaccccaagactccgagacaggctcacctgacgggaagaagccatggtcctgaaagagctgcatgaccagggcccggcgctggtccagggtgcgccgcagggaggagtatggcaccttgtcatactctagctccccaagcacgtcctcggcttctgtacctgtgcagggcacaggcagcatggcaaggctgcagcagcggcagggccttcctgccaccgtctgagtgcccacccaagccctcactgcattctatttcacaggggagtcagagaggggtcctgcccacagtcacagggcaacctaggggcctgccagactccagaacccaccactgacaggctgtgcttcctcccagcctggatggacccaccctacctctctcactctctaaccgccttccagagacccactcctcttgcaggtccccaggcccccaaagttctgcccaccacggcacctgtacggtcaaaggtgaagatgtccccctcgcacttggcactcttgggggtgttgggctccgagctgcagctggagcgtcttctcatcttgcgcttgggcgaggtggggtcctcgggtgctgaatccaggtctggccaaacagaagcagactcagtgcaggtggccccagtctgccctccacctaaggaccctgggtgcccaatgctcgcctacccgtggagttcttcctcttcttgcggtaagagcccaggatggcccggggtgaggtggccagagactgcagggtgggggagggcagcacctcctcaggccgaaactcaggcaactcagcaaagcgctcttcgaagtccacttctgacaggaccctgctggagggccggcagggtcacctcccccgcctcagcctgcagctgctcccactcccgccaccctaacacgctccaccaaggccccagcccatgctcacttgtccacagagtcaaaggtcttcttcaggggcgggggccgcaccttcaccttcttgccagtaccagccgcctccttgcgctccggggtgtccccggctgcccgcccactgctgctctcgctgctgccaccaggggctacagctggagctggggccgggctgggaggagtgggaggctccccacgattctccaggccctgcccagggacgcgccagtctgaagatgagctggggaatttgctggcctggggtggagatgggcagggagatggcgaacactgagctcagactctggggcaaaggccagaaacaaagagttggatctgagcccgcccagcagaccccttgagaaggctgtcacacggcctcaggaaggccaagacaggggcctcagatgggagaggagacaacacaggcaggcagaagggacagaggggaccctttaacctgagagacacacaggcatggaaagaagagtaggacagaaaagcaaagacgtcaatggagaggcacagccaagtggcagtgggagccccacggcctgcaggcgctcaccatggtctcagggcccttggcgctggtccgctcctcagcaggtgggggcagtggggggctgctccgggccgtgggagtccaggtctctggcaggggtggaggggctggtggtgtgggctgcccctcaagctcagactctggggcagttggctctcggactgggccaggctccagaggctgccggggtgcagggccaggccgcccagaggcacctgcctcaaaggaccccacgggaatgctggcgatggctgccttcactttctggggggccttcgggctgggccgctgggccttgggggccactaagctgtaggtcatggaacctgctagtggggagaaaattgtttgctgagccaggcctgactggagcccatcccctgggtcccccaactcactctgctctgggttgatctgacacctacctgtggcgctggggaaagggctagtcggggctggggtggcagtggcaggggctggcgggcccttgggcagaatggtggctgcaggtggggttgtgctggtggccacagtgtagaccaggcttgggggggcctgggatggctgggccaggggtgctgaggaggtgggtgcagggctgccagagtaaaatgctgttatgacaggacctccgggggctgcacaggcaggcggcagctggggactgggcacaggtgacacgcccacctgaccgggagccagcagtggggcttggcctgctgaaagacagagaagaagaagcaggagaccaagttagggcccggactgcctcagccccaccctgggtccccagcactgcctgccaggccgcccctcacctgagagcaggggctgcacgaaggcggggccgctgggccccagcgaggtgaagcctagagctacagagctcgtgggcccgtacgaggtgactgttccagcctggctggacgcagggctggtacccaggggcagcgcgtgcccgcccgctgactgcacataggtgattctgccgcaggagaggaaatggggaggagtgaggtaagccggccccgccccaccccttccctggcctctgagtatgggctcagctgcaattacctggtggaggagggcaacaggaccttctgaggctgagaggtgggtccagggagtgtggctgggctcaggggcggcaccaggccgctgggtgtgctcacaggcaccggggtcagctggatgatctgtggagaagggcacccataggccagggtgagctgtggccccagactggggcaggggaagaccaagacctcaagtgggactctaagcaaaagcaaggaacacagaacttggggtgagaacaggatgggcaagatgacagtgagaggtggggacacagagaaggaggagggtacagacactgaggacttgagagagtcaggatgcacagagacatcacggaagatggcaagacagagaaccagatacatggagaaggagaaaagactgaaaaaaaagacaaagaaatgatggggtacaggggccaacatccagcaggtagagagaaaggcaggccctcaccttgctggggggctgggcaccattctgcacaggtactgagaagggcgggctcaccagtggcagtggctggccggcccctccaccccgcactgacatgctaggggcggccagaggcactaggaccttcccaggcagcagctgggctgagccacccgggggcggggcctgcacgggagaaactgactgggctggaagttaagaggcaagaaaggaaaaggttacaagggagccaaacaggactatggcccctcccctagtgctgcccggcccaggtctcacctttggggggtggggcggagggtacagactgcaggatggggatgccaggagtgggtgcagtggcagccaggactttgccgttggtggaagtgcccggtgggagggtgaaacggatgctggtggtgggtgcagggccgctgggagccgctgccttggtcccaggggctggtgctggggcaggtgccacctgaagctgctggggcagcgtgggcaggatgtactgtacctgggtgattcccccagccttgcccagggcacctggttgcaggatgcccaggggtactggcccattggggccactcccagcacctgctcctgagcccgcagtggtcccaccaccaggggccccctgggcaatgaactggacagcagggggcgcaggggccccataccccggggtgcccaccagtaggttagtgacagtggcaggcgcc

SEQ ID NO: 94997 - DNA, 23638 bp, Homo sapiens
atgaaaaaaaccactactttctgcgctgtatcagattctgccaatagatttctttcatgtttcatttcttctatttttttcccactgtcattcttccttacttgaaacaattactagccattttcactggctatgagaacaacagggtgacagtaagtaaactatggtagattaatgtcggggaaaaataagtattttttctttccattgctaggttaatggctgacaacaaagcacacattaacatgagaaaaagtatacaaaatatatactaataagctaggtacggtggctcacacctgtaatcccagcactttaggaggccgaggcaggcaggttgcttgagactggcaggttgcttgagaccggcctgggcaacatggtaaaacctcgtctctactacaaatataaaaattagccagacatgggggtgcgcacctgtggtcccaactactggggaggctgaggcaggaggattgcttgatcccaggaggcagaggttgcagtgagccaagattgcaccactgcactccagcctaggtaacaaagcgagactatgtataaaaaaaaattaatatgagagaagcatataaatttatttaatataaattttatatgacataggagcttttgtaaagaggaaatacttaggtggcaggattatggatgtattttgttctataaaatttcaatttgatgttaggtaaataccaaacacatcttactaaaaagagagtggcaaggctgggtacaatagctcatgcctgtaagcccagcactttgggaggccaaggtgggagaataccttgagcccaggaatttgaagttatagtgagctgatatttgtgccaatggactctagcctgggtgacagagtgagatggtgtctctaaaaataaataaataaaaagggagagttaataaatttttaatgtacatcatttatgagaatatcagaaaacatcaaatacctacaaatgaggtctaatgaaagatgtgcaaataattgttaagcattgctgagagaaattagagaagacttcaataaatggagagatgccaggttcatggattggaacatgcggcatagttaagatgtcaattctcccttagattgattgatagattcagtacaatccaagcaaaatttttggtgaaaatacaaaaaccctataatagccaatacaattttgaagaaaaggtataaagttgaaagacttaacagtatgagaaatcaagacctactgtagagctacagtaattgagacaggttgctattagcacaagggaagacaaaatagaacaacagaacataatagagagtgtggaaatagaccgagaaatttgtggtcacctatttacaacaaaggcactatctcaattaggggggaagggtagtcttttcaacacatgctgctgggaaacaaaatgacccttaacctctacaaacaaaaattagttcaaaatggatcattggcttaaatatgaaaggtaaaataattaagcttctaggaaaaaaaaagataggcaaagttttttgttgttgttgttgttttgtttgttttttctcgctctgttacccaggctggaatgcagtggcttgatcacagctttttgtagcctcctacagtaagctgggcttactgggctcaagcaacccttctgcctcagcctccctagtacctagtagctgtgccaccatgcccagctttttgttttttgttttttgtttggtagagtcagagtctcgctatgttgcccagcatgttctggaactcctgagctcaaacgatcttcctggctcagcctctcaaagtgctgggattataggcatgagccaccatgcccgcaagacaggcaaagcttcctaaacaggacaaaatattatacaacactagccataaaagacaagattgataaattggactttatgaaaattaaaacctctgttcatcaaaagacaccattagagtatggaaaagtaagtcacagactgttttactgcttggaggatatacctcaattaaaacatttccttaaatggacagatgaggagacttccatttctgaaagatggaacagacattctttgcctatccatcccagtaagaaagctaaaacctttgcgcctgtaatcccagctacttgggaggctgaggcacaagaatcgcttgaacccaggaggtggaagttgcagtgagtagagattgtgctactgcactcttgcctaggcgacagagcaagactgtctcaaaaaaaaaacaaaaacaaaaaacaagggcagggctgggagcggtggctcacgcctataatcccagcactttgagaggttgaggcgggcagatcacctgaggtcaggagtttgagaccagcctgaccaacatggagaaaccccatctctactaaaaatacaaaattagctgggcatggtggcacatgcctgtaatcccagctacttgggaggctgacctcagcaggagaatcgcttgaacctggaatgcggaggttgtggtgagccaagattgtgccattgcactccagcctgggtaacaagagcaaaactccgtctcaaacaaacaaacaacccacaaagcagtaataaggattttagtgactgggtgcagtggctcatgcctgcaatcccagcactttaggaggccaaggcaacaggaacgcttcaacccaggcattcaaggtcacaatgagttatgattataccactgcactgcagcctgagtaacagagcaacaccctctctctaaaaagaaaaaggattttagagatcttagactaccacagtatttattcctaataattgagtatttttaaaaaattaagtaaagtacatttggcctttttctttctataactctataattgtgaaacttcttagcctgctgggcatggtgactcatgcctgtaatcccaactctttgggaggctgaggccgaaggatcacctgagcctaggagtttgaaaatagcctgggaaacatagtgagatgccatttctacaaaatatgcaaaaattagcctgatgtggtagagtgtgcctgtagccctagatacttgaggggctgaggtgggaggatctctttagcccaggaagttgagactgcagtgagccatgaccgtaccactgctgcactccgctttcggtgacagagcaagaccttgcctcaaacaaaacaaaacaaaccagaaagaaagaaaaagaaaagaaacttcttagcctgtacaggtaccttttgtattgtagaccctctggaagtttggcgaaatgaatggaccctttattataataatgctttaaaatgtataaatacataggacttctaagaaaatcaactaaattaaaatatggttatcaaaatattttaaaaatgtgttacagtgatacgtttctctttattgacacattaaataataatagctagtgatgggtttaataattactgcaattttgaagtagcaatgactagaaatgacattttgaaacaattattgtgaaaagaaaatatctgtgatttctgtcagtgacaaaaatcacaagctctactaatactagtttgttgcccatattcataatcaaaagaaatgttaaattttaattagaagttaatgaaactaaaaatgaaacactgattctatccgtggagcccaagttaagaactccaggactacaggcttccccaaaacattaacagtacttatctctgagtgatggaaatatgggtggtttacatttttttcttttctgtatttttcaaattttccacaataagcaaatatcacttttataattataaaacacatgatatatgcaatagtaaaaggggtgatatggttcggctctctgtgcctacccaaatctcatgtcaaattgtaatctccacttgttaggggagggacccagtgggaggtgattggatcatggggacggatttcccccatgctggtctcgtgatgctgagtgagttctctcacgagatctgacggtttaaaaatgtggcacttccccactcccctcctgctgccatgtaagacatgcctggcttcccctttgccttccaccattattataagtttcctgaggccttgccagccatgtggaactgtgagtcaataaacctcttttctttataaattaccgagtctcaggtagttctttatagcagtgtgaaaacggactaataaaaggagtgtattaattgtcagattcggggcacagaaataaaactagaaaaataaagaagtgcttgaagaaatcctttaggaaaaaagaaagggaaataaaattctgaatgaagatgaagaaacggaacctttcatcagagagacttaaagctggtgagacctttatgccatggatctttttttttttttaaatgagtatagacacagtcttgctctgttgcccaggctggtcttgaactcctaagttcaagtgattctcctgcctcagccacccgaacagctgggattacaggcatgctccaccatgcccaggtaatttttttgtatttttagtagagatggtttcaccatgttggccaggctgatcttgaactcctgacccaagtgatctgccctcctcagcctcccaaagtgctgagattacaggcatgtgccaccatgcccagcccatcacaagtgttttgacagtccacatagccactcctgggccacatcagaagtaaaaatggaactcataggccactattactcatgagtttagtaattttattatccatttcttctgcatctcccgctcctgcttaattcccagccaggtcttgcctgtctaccacggtccaagcagtcatttgggagagagaactcccaggcagtgaaatccaaactccttaccagaccctacaagaccctcttggatctgacccctacctacctccccaacttccaactgttttccccacacaccaacctttctcgccttttgattatttcattaagccaagcttgttccaacttcgaggggtttgcctttcctggtctttctttctggcaaattcctcctccagagctccttcagtcctgtctggctcgtcacccttgtaactcagtgtcctcttacttagagacttcgcctgactgccctatgtaaagtcctcagtccatccctgccagtcagcatagtattgccaacgatactctcttatttccatattgtctcctactagaaaggaagctgcccgagggcagagattgtcatcaacatcgttcactgctgcatcctcaagcacctcaaactacccggcacaggaaaagagtaagtgaaatgaatacccgtgggctctccttgcggctcactctggcttagagaaatcggcttgccaagcaaaagcatgattaaaactgtgggtttgggctgggtgcggtggctcacgcctgtaatcccagcacttcgggaggccgaggcgggcgaatcacctgaggtcaggagtttgagaccaacctggccaacatggtgaaacctgtctctactaaaaatacaaaaatcagcagggcgtggtggcgcgcgcctgtaatcccagctactcaggaggcttaggcaggagaatcgcttgaacccgggggaagcaggttgcagtgagccgacgtcgcgccattccgtctcaaaacaaaaacaaactgtgggtttgttttgagacagggtcttgctctctcgcacaggctagagagcaggggcatgatctccgctcactgcaacctcgacctcccaggctcaagcgatcctcccgccttggcctcccagtgctggactacaggcctgagtcaacgcgcccggtctaaaaacgattttaatctttccactgaactattgccccgacgaggtttgttcgaagacagtcaaggccggcccggaagaacgcacaaccatcagcccccagcagagctctcggcgcgcaactgaggctgcgcaggcttagggcggggcgtggtgacgcggctgccggaagcgggtctggagcgggcgagacgrccagggcsggcgagcgcagtgcagcgccgygcggtgcgggcggccgagtgggggcgtcatggaggatgagcgragcttttcggatatctgcggcggccgcctggcgctgcagcgccgctactactccccrtcctgccgggaattctgcctcagctgccctcggctctcgctgcgttcgctcaccgctgtcacctgcackgtgtggctggcggcctacggactcttcaccctctgcgaggtaatggcaagtcggcccctccccgcgctcgaaggagggggttcggctttgggagggtctttggggtctttggtcgagcccggacctctggtcggcccctcctacagtgataggacaggagggcgggaactcacgggttctggggacgatattccgctgctggacagctctttaaatgacgwttagtgaaatgtgtgctcctggatagtacattccccttccgtggctgtgctctgctcggtgggttcactcagcatacatctagttcttgcgcgacggcctaaaactttaacttccatgtgttctatgtagtataggcgcgcagtaatttaattccaagagttcaaggaactactaagtgggtcttcctcgtccatcccttctgctcctcaaagtagtactgctaacaatactttacgtagacttccacaaactgtctttgcctccacaagtgtgtgtgtttatctgtgtgtatagatagagtgttatagttcttcctaatctctgtttttcaagggagttttttaaccctccctcctcccaaacccttccccaatttcaagtactttctaaaggtttatgaaattttggacgtgtgtgatagctgtgctcaatttccagattcattcctgttttctctgagcctcaattttctacatctctaaaatagaattcatgcctgccataccagcttcatgatattgtgagggttaaatgcagtaactttgtgacagctctcaaataaaaagaaytatcctaattttcaggataagttctagtttcatatgtagtgcctgaattgaatgtattatcccagaagtgatctaatcagagctaagtacagcagggctatttatttttgtaacttggatattgtttccattactgcatccattygcttttttgctgtcaaagcgtgtttcagagcatggtaatttagcatagaaatatgcagaattaagactgccctaattgcaggaaactatctaactatctaaaccgtatgtttgttcaggcaaagcactgtacctcacgcctgtaatcccagcactttgggaagctgaggcgggcgggatcacttgaggtctggagttggagaccagcctggccaacatggtgaaaccacgtctctacgaaaaattcaaacattagctgggtgtggtggtgcacgcttgtagtctcagctactcggaaggctgaggcgggagaatcgcttgaacctgggaggtggaggtagcagtgagccgagatcacgccactgcactccagcctgggcaacagagggagactctgtctcaaaaaaaaaaaaaaaaagtttgttcataagtcagttaaaatgatgattaagttgacttgatagcccccctaaaatttaatttattgtatagttgaattttagtactagcctgagttcttatagcctrtgtatgtggtcatgtgaggaggaggaaatagatatttattaaatgcccactgactgccagatgctttactgaattccttactttagccctagaacgaaggaaaccaaggctcacaaagagcaatgacttatccaaagtctcaaagcagtaaatggcagatctgggcttcaaaccaagggctttctgactctgagaccctttcttttcctttataccattgtatagctgatcttaggcaaaatttaaaaacaaaagcctgcttttatgccaggtcccttctgtacttrtctctctcatgccggtgtactctgcttacccccatcaagtacccgaggaatcagtgaccgcatcttcctttaaactctactgcaacactttctaagggctctgtgtgccaaaatttcttacctttcctattcaaaactgtttatgagagtaatgaatatctggaatgagaagaaatctgattgaaggaattcattcaaacatacagcttaaccccaacccaaattaatattgaattgtttgaattctacacagaaaaatgaagttgaaaaaaatgcagatagtagggcacggattgcttttattggaaagctgacatggatcaaatccttaaggatttattgttcttcatcccttcattccttcttgtttttgagttgacagttctattaaagttccaggttgttcccttgtttattccaacctggaatgttcttcccccttccctttcaactaattatattggtcactaaccaccacttcccctacaccaattaaatcctgtttccttggatgtgatgggatattcttgtgtgctttaatgtatttttcttttttttttttaaacttttcttttggcacttatagtcagtatcagagtatcctccagaatattttctatgtattaatcttgcctttaatacatctataagggtcagggctgaattgtattcctctccattcttcttaatgcttattcaatgcaattaattaactcaaaattagatctttctggatcatcagagacccagtactgaatcctccattcatcaatcaacaaataattatctagcacagagataagcaaactttttttttttttgagacaggtttctttgttttttttgagacaggttctcactctgttgcccaggctggagtgtagtggtgtgaatacccctcactacagcctcagtctcctggactcaagcgatcctcttatctcagccacctgagtagctgggactacaggcatgtgccaccacacctggctaatttttgtattttttgtagagacagggtctcactaggttgcccaggctggtcttgaactcctggcctcaagcgatycccccatgttggcytcccaaagtgttgggattataggcatgagccaccatgcctggcccaaacattttcattaaaagactagatagtaaatatagcaggttctgtggggtctgtctcataatattcttttctttctttctacaaccctgtaaaaacttaaaaatcattctttgcttgagatgggccagacaaaaccagaccacaggcccaaatagtttacagatccctgatctaacactatgggttaactatgaaaaagtagaaagagaccatcaaagaaaaccagagctagtgagtagttgaagtggtacaaaaaccagatgttattcaggaactattacagtaggggaaaagagacttcagtatagacttccaaatttcctcagttccgaagatagcatggacaagtggagatttatagccaaggagcaaggtgggagtcagtggatggaaaattacccaaaggaaacatcaggggcaaggtgggattctggctaaattgacttgacaggattcttgctgaaggcatgccaggctgatcaaataccaagggtgggagttctttctaaactgattcagcaagattcttgctacaactgggtgggtagtgcaggcccaacaaagatgtcaaggtcagggcctagacagcttagaggaacctgactagaagtagataaaggagggcatcttgtcagtgcaaagaataataagacacttcctgccctcaaggaatgcagtccaaaattacaaaatttctttgattctaggtcatcaataatttttttcctgtgccagtcttctaaatcatagctttgccgggtgcggtggctcacacctggaatcccagcactttgggaggctgaggcgggtggattgcctgaggtcaggagttcgagaccagccaggccaacatagtgaaaccccatctctactaaaaaaaaaaaaaaaaaaaaaaaaattagctgggcgtggtggcgggtgcctgtaatcccagctactagggaggctgaggcaggagaatcacttgaacccgggaggtggaggttgcagtgaaccgagatcacaccattgcactccagccagggaaacgagtgaaattctgtctcgaatcaatgaatgaatgcaagcttctgggaaaaaagataaaacaatgccacatgaaagaaacacacaccaataggaaaacacattttaacttcagaaatgttaaagattatacattggtcttagaatcaagggaataaataatagacaccattttttgagcccttaacacatcacttagtcaactgtaagtaacacagaacaactaaaatagccttaagagataaggaccttttmtattaacaagaagtcataaggtaggagggctccagagttcacrtggagactcatttgattccggctcttgtcatcttactgctgacacccttagtgtgccctacttgtcctccacctggtcctccaagtgcagaaactgcacttccaacccttagcgtcctctagttgtcctctactagctctccactgggtctggcagaggccatagtagttccaggtatctaaacctcatgatgaagggaacgtctcttctgcagatttttaaagataaactcaagttttccagaagcccctccagcagatctcccctcacatttcattggccagagttgtgtcacatgccaatttttaaagcagtcattggcagaaggagtgggaaccaatcatggttcactcactgttcaattggggctggtgggtggctgtttattaggcaagccatagtatctgctacactgtgctaagcactttataattgttcagtctatgattttgcactatatacagatggttcccaacttacgatggtttgacttaggatttttttgactttaggatgatgcggaaacaatacaaagtcagtaggaacggtacttcaagtaggaacggtacttcaagtacccatacaaacattgtttttcactttaagtatagcattgaataaattatatgagatttaccacacgttactataaaatcagattttgtgttacatgatttgcccaactgtaggctaatgtaagtgttcttttttattttttttatttttatttttttagacggagtctcgctctgtcacccaggctggagtgcagtggcgcgatctcggctcactgcaagctccacctcctgggttcacgccattctcctgcctcagcctcccgagtagctgggactacaggtgcctgccactacgcccggctaacttttagtatttttagtagagacggggtttcaccgtggtctcgatctcctgacctcgtgatccgcccgcctcggcctcccaaagtgctgggattacaggcgtgagccaccgcgcccggcctaatgtaagtgttctgagcacgtttaaggtaggctaggctaagctctgatgcttgataggtatattaaatgcattttttaattttaattttttatttgagtgctagaactaaatattaaatgcattttcatcttataatgggtttatcaggacataactccctcctgtattctgctgagggagtgtgaaaggaaaagatttggggtcctttttttttttgagatgtctcactctgtcatcaggctggagtgcagtggtgcgatctcggctcactgcaacctccgcctccgcctcccaggttcaagcgattctcctgcctcagcctccagagtagctgggactagaggcacgtgccaacacgcccagctactttttgtatttttagtagtgatggggtttcaccatgttggccaggatggtctcgatctcttgaccttgtgatccacctgccttggcctcccaaagtgctaggrgtacaggcgtgagccacctcactcggctgggtcctttcgatttttagagacagtgtcttatgctggtacccaagctagagtgcagttctatgatcatagctcactgcagcctcgaactcctgggctcaaacgatcctcctgcctcagcctccctagtagctggaattacaggtgcaagctactgcrttcagctgatttaggccctaaagttggaattttggaagaaaaatttctgagattgctgtgatggacattttgctgatggaggtttcccctagacctatccatttgttgtctggatctgtttcactgtatactttcatagcaccttagaacccaaataaaagcaatttccttttcctccatgcatgttcccctcattgcctggagttgactggtaccacttggtaatcttactgtctgtgtctggctctctcttcagaacagcatgatcctctctgctgccatcttcatcaccctcttaggtctgcttggttatctccattttgtgaagattgatcaggagactctgttaatyattgattcccttggcattcagatgacttcatcttatgcttcaggcaaagaaagcactaccttcatagaaatgggcaaggtcaaggatattgtcatcaatgaggccatttacatggtaagtatttaaaaggtaagtattacaggcctctctggaggaggtagccagcccatgggatgttcccagatttaaactaaaaccrtaaaagtgagactkatatttaaaaggtaaatctctttatttttaaagagatgcagcaggttttcatggatagggaattagcatttcaactttatcttcaagaccaacttcaaaattatcactggcattttttccttctctttctatcttttttctttttttttttttgagacagggtctcactctgttgcccaggctggagtgcagtggctcgatcacagctcactgcagcctcaacttcccaggctcaagccattctcccacctcagcctcctgagtagctgggactacaggcatgcaccaccatgcttggctcgttttttctatgttttgcagagatgcrgtctcactatgttgcctaggctggtcttgaattcctgggctcaagccatcctcctgctgtggcctccccaagtgttcagtttacaggtttgagccactacgcctggccctgtcttttttcatttaaagaatgagaatatacttttcttccacttcaaaagctatcaagtgttctactacttaaacatttgtgaaaaagcgttgagccttcccttagaaaaatagaatgtggccaggtgtggtggctcacgcctgtaatcccagcactttgggaggccaaggcaggcggatcacctaaggtcgggagttccagaccagcctgaccaacatggtgaaaccccatctstactaaaaatacaaaaaattagccgggcatggtggcgagcgcctgtaatcccagctacttgggaggctgaggcaggagaatcgcttgaacctgggaggtagaggttgcagtgagccgagattgcgccactgcactgcagcttgggcaacrgagagagactctgtctcaaaaataaataaataaaggaaaaagaaraaaagaatgcaaaatgagtttcacttagactttgctatttgatttattttcttacagcagaaggtgatttactacctctgcatcttattgaaagatccagtggaaccacatgggatatcccaagtagtacccgtcttccaggtgagcatagaatacttttaccattctccaattactcctcaaccttttcattaggaatgtaaattccttttgtcagagtattggaagatacctgacagctgttttgagtgataattaggatttcagttatttgagaagttcctctctgaggcaaatgtattccttaaaaatattcatgcacattttattttattttagagacagagtctcactttgtcacctaggctggagtgcagtgacaatcaccactcattgcagcctccacctcccaggctcaagaaatcctcctgcctcagcctcctgagaacttgggactacaggtgtgcaccatctcgcctggctaattttttttttttatttttagtagagatgaggtcttgccatgttgcctaggctgatcttgaactcctgagttcaagcaattctcctgcctcagcctcccaaagtgttgggattacaagcatgagccagcatacctggcctcatgcacattttaaagaacacaatcaaatatatagcaacttctgcctataaatcaccattcatctactttgactctgtcagtctactactgtacactttttttagatagaggtaattgatcttacattgtacactattgtgtgtcttgctttgtaaataatttaatatgtatgtatcctacaaaggccattatatttattattttaaataattgtataatatattgaaatatcagtttatttagccactcttgccagcttttaaaatcatgcctgggtttttttgttttgctcttacaaaaaaaaaaaaacacttatcagctggtgcagtggctcatgcctgtaatcccaacactgtgggggaggctgaggcaggcagatcacttgagctcaggagttcgagaccagcctgggcaacatggtaaaacccccatctctacaaaaaataccaaaattagctgagcatggtggtgcacatctgtggtcccagctactggggaagctgaggtgggaggattgcttgagcccaggaggtcaaggctgcagtgagctttgatcatggcactgtattcagcctgggtgacaagagaccccatctcaaaaaacaaaaattatacaaacataataaattacaaaataataaatttagaggtaggtatttatgcatgtatttatgtatacagttaaccctgcctcactgacctttttcacaaaggatttaagataagccaaaaattattttgcattgtaattcaaaattattttattaaagcttatgaatagttttatagatttctagtgtttaagatcgggctccagagattggacaactttatcatactttggggattttgtacttctttttctaccatcctggctaatagtggatttagcttttttagcttaatatgtaggtaaaggcattaaatttgtatctctttaaatgataggcttttcatatttccttgtattacctatcagtatttcctcttaytttaaactacctatcttctctattagtcaagtagaatctgaatattatgtatttgtatctatttttatatatttttaacaattctttatatattttaggtagtgcacttttattaaatatactttcacatatattttttccattctgtggcttttcttttaattttggttattacatttcattgtgtaaaacatttttcaatatttacatattaaactgcacttcttgtgtttgagggctgttttacaacttgtgacatttctcaagggtccattttgtttttcctcttgcttattcttagagrtggagttcatgaaatttagacagattaaaaagctatcatttgatctcccacctcgcatagttcacaagctgtgctgtaagcctagctgggactctttccagcaaggtgtgctgaggcctaaacttcttaactccatgagctcactgctgtgtcatttataccccttgatgtgggtgagagattgaagttgcatgtggtcccggcaccatggctcaagcctgtaatcccagcactttgggaagccgaggtgggcagatcacttaaggccaggagttcaagagcagcctggccaacatggtgaaaccctgtctctactaaaaatacaaaaattagttgggcatggtggttcgtgcctgtagtcctagctacttgggaggctgaggcacaagaatcatttgaacccgggatgcagaggtttcagtgagccgagattgtgccactgggcgtggtggcgagcacctgtaatcccagctactcgggaggctgaagcaggagaatcacttgaacctgggaggcggaggttgcagtgagccgagattgcgccactgcactccagcctgggcaacagagcaaaactctgtctcaaaaaaaaaaaaaaaaaaaaatttgcaagtggatgcagcaccactgcactcccttatattctcaccttgactcygcatttctcccctttggaattcagagtgccaagccccggctggactgcttgattgaagtatacaggagctgccaggagatcctggcacaccagaaagccacatcaacaagcccatgagccccagcgttcagaaggccagcattgtcttccatgggagatgactcttaagccataggggctggttttccgtactccaaaccatcaggtggacacagtcctaggaaccattatggatgtagtgcatcttagagccatagagcaggtgactggaaatctaactcagtatatttccgtgtattatagtgttttccttgtaaggttttgcctactttaccaaaggaggggagaccttaagaattttgacacagtatgtcaaaagtaatgtcagcaaagaacactttcggaaattgctaagcatgttcaggtttactttgttgatgtttgtgaagcaaaacaatgggaaactgacatcagatgtcttgagaaagctatattttccaatagtaccccttgtgtaaagttacgaaaaaaacaagcccttcagtactggttagcaggaagaaatgtcctacaaaagacgagtctgtcaacctagtgcctgtgttctgtacagggcttatttatttactgttaataaacagatcttccaaaacacacagttwcctggttcacagatagctgctttttattgacaaacaagatcatagtatttcagtcatggtgtcaagcacattaatacttttctgttactcagcatttttttwtatatcagttcaaaagctacttttgccaagaaggatgagacaaaaggccagacagaawttggactttggttttcagacatgggactctcatgttaacaaagaataaataagcaaatattgaatcctttgtttctaagttagtttcttctgtataagattaataaactaaagggttcctgaagggttggggaggagagagggtgggggaaatagattgaccccaaattcagtgtgaacacagctccattcttgtttactcttccttyggactcctacttttcttctaaactctctgggtagataatgttatccttattggccttagagatacccaagatattataaaaccagagctgttatgtctgtcaccagccctgcaggaattattcaggaacctgtggtacatgtgacttgttcgaggtagaaatgtctcagctagatccccaagttgtggggtgaaaagtgtgaacagaaatggctgtaaaactacttgccttgcaaagtcaagtacatttaaaagaggcagaaacttggatstgcttcttttttcatcatgcttgtcagtttacggggtgagagaggagaagcttacagcagctgaggtgttcagataaactagttctggcctcgcagtttttgctgtgcaaaagatacacacattgttggggttaaaggcttggttttgggtgctactgctaaatatacagttttcagcactttactgacatatagtaaggctgccttagagctaggaaataaaactcagtttcctagatgttggaaaatcagagtatgaactctttcgttttgtttttgttaggggagggtgtgtctacaacctgtctagaggagactgtctagtctcctctgcactcaatcagaaggtctgaattgagggggattatggtattatcagtaaggcaaaagatgaaagaaacttttttttacctgctactcttaggctagggcaaatgtcacatatgtaccctcaccctcaaactaattcccagcagaagtttgccagaagtctcaaggagcatatccaggcccacatgcctgaaatagtcttctgtgtttctgactcatttttggtggtcttacagcagcaaaaagcagagtgcatttgcttggtcttttacaagaagaaggaaacaaatgatggcccactacagtgaacacagccttcaccgagcgctgtccagtcattaaaatgagacagggaggggtcagattggacctacctcctgcccttgcttgcacattgcgtggtactgggtttggcctaaagtccagtgtgaggaaaacagcttgaatcttagcaggtatagcatgttatcctgcaaagactgccccagaaggggctgtaccaatgcctacataccaataatggggaaaaatgagtctattcttttttctccaactctgtcagcacctttcccatttgggaaaggcagcccagtttagtgagttctaggcttctgacagagtgtaggagaattggaaattttagtcctatcctgtttagcgacgttcacaaaacttcaagtataaataagaccatatacaatattaaaaaattagcttctgggctgggcgatggctcatgcctgtaatcccagcactttgggaggccaaagtgggcagatcacctgaggtcaggagttcgagaccagcctggccaacatggtgaaaccccgtctctactaaaaatacaaaaattagccgggcatggtggcgcacacctgtaatcccagctactccgaaggctgaggcaggagaattgcttgaaccctgtggactgggtgacatagtgacactgtgtcccccgccccccccagaaagaaaattagcttccttgagagtaccagtgcagaaagccttaacttatagcactgatgccctcagtaacagtggatcatccctgtctatgtctagaatcaggtagcatctggagtcattattcttatgaaaaaaggaataaatggttttaacactgggtctggattttaaaaagttgagccctgaaacattataaggcacctagagagtaaaggcttcacagagactaaaatacacatttcacagaacaagagtagccgggggctgttagacccgtcacagtagtatcataccctaggatatatatctctaaatccagaggcactagtggtggtggggaatcgggtaggagaaatattcacagcaacgttggccccttggtagcacaggaaacagaagaaaagaactgtcgtccatccagttcccacagctggcaggctccgggtgggttggtgggggggttcacagttgtagtgcaatggttcatatagctggccatgatgaaggtagcttctgcaatctaagaggaggtcagagatgtgaaggaattgaactagccttggcttgaatcctggctttcttacttattagctcttatgctgagttcctgggcctcagtttatttaatctcttaaaatacccacctgggagaaaatatccaaagggaatcataactgtgctgttcagaggcccagtggtgtgggctcctgttggtctggagatcctctcagatgcacagtgcccttctgagaaaaggaggcccagtgttctgctctggttagctctacaaccagggaaggggccttcttaagaaagggatctggagatcctcccctttagcaggggtggtattaaaggaggagtaggtttggcaaactctaactttaggattaaaaaggagaacaacagggtttccagttaatcacacgggagtcaggaacaataaatcagaacttagcctttgtaattattatttttgctggtcaacacttcctgtattgagtaggaacaaagtcactaaagcaaaagaggtctttttgcggtcttccccacaacaaggaagagggagcactgtgggactgtcccactttgtagctaatgttgggtcagcagaacccaggggtaacatgcgagcaccttaaagaggaatctgccctgcctcgaggactgctgcaaggaagagaagagcacgtaagcacccaactgaggactgcatgatgctggggcttgagagaataaaaaagaaaaagtgaagagcataatagtagctaggccagagttagttccctccaaatatgtccctttacctactagctgaacattgatacggagatgcaacaccacctgaacctttggaatactaattacagacaagaccaacaattttatctgggcagggcccttgcagagcactagcataaccccagtttcctttctaagctccaagcccaccacatcttgccagagtagaacgttttaacagctgtcagacctaccttgggagcagccatccggaagatcaacttctcaatgtggctttttccagagctcttgtctgggatagatctaatcacaagcatgaagtcatccctgcagccaccaaacgttgtcactgaagagtaggggtaagtgatgtgcacttgctgtggaaaggaaccagtcagttgtggggaaactttccacctgtcccctgagctaggaaccagcatcccctgtctcttctaggcacaggaaaggagaactcccaagtggtcataatttggagatctccatcttgaatatctacaagcagtgtctagactagaggactggtgcttgggcaggagtgggggtagggcagccatggtcacttggttcaggcttttgagtccacagaggagaagaaaagaccatgttgaggaagaggaggggtcagggagcagcctgcatcctttcataccatagtgttgtggtccaggatgctgacgccatcctcattcacagcaatccacaccagagcgttctccttggaagacagctgggcaggctggggaaacagaaacaacccatcagatatatccatagttagagattttgaactataataactttctgagaaagaaggcacatccagggatctgctaagcagtgatttccagccacctcatcttggaaaacaaagatgatatttgtacagtgtatgcaggaaatagacaaggctgcttgtgacaggagacccttggccttggggctctggccacctactaaccatctcaaaggcagaggcgatcattcttttgatgtccctagaacccatgctgccacagcacactggatggaaagctctgtgctacagaatagaggccagccctagctgctctgttaggggaatggggaacagctggttttctcctagtcttggaaacacggcattccacctatagtctccaagccgaagtgcttctgacttcagccaatctcctaggtgctgtaaaagaaataggaaagcaagaatgcagtcctgtggctttaggccctatcagtaagaaagtgactatttagtggacattcctgtaatgactaattttcactgccaggactacagtatggtaatccagaaaatctctctcttaacccaaagggaggcagatagacattggacatgccacctttttcagaagcttttcctaagctcccagaccaagtgggtccctgttatatgcctttataacacctctgtacatcttcatagcatttgtgatggcttataaatatatattaaatacatagagaaaaaaatgaatacgattatttgatgaatatacatctcctgcactagatgggaagctccaggaaggcaaggactgtgtctgattttctcacttcttataacctcaaacaaccagcactggacatagtaggagctcaactatttgttgaatgaatgaatggccattttccgatctgtggcttcagtaaacaggatcactgcccagctttgagctgtaattatctataaagtttatgcacaacagacacccagtgaagaaaagttccttctgaaattactgttggccacctggccttcatacagaggtgaaattaactgttggctaagtaatttgattcccctgtatgccatgtcaaaccagtggagatgtatttgtttaggttatacattgttctttcaaactttaaaaaaaatgaaagcactcttgagagggctgttatttcaagtctgaatctttgtgtgtgtgaattagttgatcacatcttttcttttggggcagtcaacaaaggacaaatgaagataagcaatcacaattctgctctggactgtggaaagctggactaggccagaaacagtggagggatagtgacctctggtggttactggtatggaggtaggggctgcaaattggtatggctcaaacatgagcagttggggacacacctaagggtgtgggcagctccttccactggcacttacctgagcagcaaaaagtttagcaccaaagaaaggccatttcctggccacggtcaggtagatgcggatgcactcaggaggggagcatccttgcaatgttgcccattttgtggtcaacatatctgccaggtgcctggtgtgggcagatggagagaaatagtgccaatgaagtgccgacgtgtcttcattccaggcctgagacctccccacagtgacttgctgcaagaccttgtagcctacctacctcagctgttcagcgggggccccatgtctatagcgcctggggtggaacctgtctaggacctgctggagaagatgctgagccttggcaggggatgtgcctccagggcctggcagggcaggcttctccaagtccccatattctacctgtggtagaagcatatgaagagaccagtcaaaatctgacagtggatgggccaggtgggggctgttgagaggtgaaataaaccatttctttattaccctattggtggggtgcgagtggttgtgaaaaatactttagaaaaacgcttcatctcaagttttatagacactagagaaacaaacttagggccctcgaatattagagatcaccgaccaactttgattttgcagctgaggtgaagtgccttttccaaagacacagttaattggtagccgacaagggaaaacaatgtggaaattctggcttccagtccaaaaatatgggctatagaattgaagatgctacagatcctagagtacagcagagtgttccaaatgtggcctttggagttggacacctggcgcaaatcccagctttgtgtccctgatcaagttacttaaactctctgagcttcaatttcctcatctattaggtgggaataaaaactacaatggaggatgcatatatgcttagtacagggcctcctagagagtattcctattgatatttataaagatcaactattactgtttcctcttcctttccagcatgtaaatccagattcttattcttttttaaaaatttttaatttttaatttttgtgggtatatagtaggtgtcagactctcttatgggagtcatgaaggtatcccagatacctttggcaagatggccttctaaatataatgggaaggagagtccaagtctgaatgtgtgttcctcttcctaagtctacttagaaggtctgatggtttatgaagtttaccacatacattacatgatacaattatccaggtatcatacttagtacaaccctgtggaggctggcagaggtttttgtttgtttgtttgttttgttttgttttgagacagagttttgctgttgtcgcctaggctgtagtgcaatggcatgatcttggctcactgcaacctctgcctcccaggtacaagtgattctcctgcctcagcctgccgagtagctgggattacaggcgcccaccaccacacccagctaatttttatttttattttattttattttatttttttcagtagagacagggttt

SEQ ID NO: 94998 - DNA, 30955 bp, Homo sapiens
gttcaaacatgtcataaatagtctacagaaatcataataggcctggcgtggtgactcatgcctgtaatcccagcactttgggaggctgaagtgggcggatcacaaggtcaggagttcgagaccagcacagccaaaatggtgaaacctcatctctactaaaaatacaaaaagtagccaggtatggtggcgcatgcctgtagtcccagctactcgggaggctgaggcgggagaatcacttgaacctggaatgcggagtttgcagtgagccaagatagtgacactgtactccagcctgggcaacagactccatctcaaaaaaaaaaaaaaaaaaaaaagaaattataataaagttctttaaaatttttttaaatgtatatgtgattaagttggctataatcaaaaaaaagttataagtgtttctaaagattgagattttggtcctctatgttaaaataacattgtcttaaagtataaatttgctcttagtgaattacaagagcttttgattttaaattctacaatctatttcttttctaaaacttctcaaatttatatctcaaaaaattctacttgtgctatacctcgctgcacatgattcccaagtcatgaatcgttgttgttcgttctttatacccttaaaaagatacatgtttttcttggttgaaatgataatcctctccttcaacctttttgtcaacttctgtaatctttgacttttttttttttttttttttttgagatgaaattttgctcttgtcacccaggctggagtgcagtggcaagatctccgcttactgcaacctccgcctcccaggttcaagtgattctcctgcctcagcctccgagtagctgggattagaggcattcgccgccgtgcccagctaatttttgtatttttagtagagacagagtttcatcattctagccagcctggtcttaaactcctgacctcagctgatccacccgcctcggcctcccgaagtgctgggattgcaggcatgagtcaccatgcccagccaacttctgtaattttttttttttttttttgagatggagtcttgctgtgtcacccaggctggagtgcagtgccgcgatctaggctcactgcaagctccgcctcccaggttcacgccattctcctgcctcagcctcccgagtagctgggactacaggcgcccgccaccacgcccggctaattttttgtatttttagtagagacggggtttcatcgtgttagccaggatggtctcgatctcctgacctcgtgatctgcccacctcggcctcccaaagtgctgggattacaggcgtgagctactgtgcctggccttctgtaatctttttctctggttctaactctggtgtggcctgatgctaaaatgtttatcttaaagctctggaacaaaaccattttcctccaatataacttgattctgtagtcttggcttttctcgatatagctaaattatttcctataaccagggcacttttgatgctgttactgagacatatttattgtcctgcttaagatacaagtttccttgtttactttcytcaaaaatatagtgtacactcataactctggacacactcttcctgtattttaattaaatccaagtatcctttttttttttctcgctctgtctccaggctgcagtacagtggcatcatctcagctcactgcaacctccgcctcccaggttcaagcgattctcctgcctccatctcccaaggagctgggactacaggtgcgcaccaccacgcccagctgatttttgtatttttagtagagacggggtttcaccatgttggccaggatggtctcgatgtcttgacctcatgatccgcccacctcggcctcccaaagtgctggaagtacaggcgtgagccaccgcgcccagcctaaatccaagtattcttttcattgagtttgtcttccaggttatctaaatagagttccaataaagaaaaacaatcatattacaaaaggtttttctttactttttagtaactatcctaaaatttttcttaatgttttatcaaggtaattcctgtgacttactgtgttttgatcactttaaaaaaaaaagctttaaaaaggtgaagattttttacatccacataactttctttctttctctctctgtttcttttttttttttttttttttttgagatagggtcttgctctgtcttccaggttggagtgcagtggcacaatcacagctcactgcagcctcaacctgtgaggctcaagaaatcctcccacctgaacctccggagtagctgggaccaaaggcacacaccagtacactgcctattttatttatttattttttgtttatttattcatttattttttaaatttttggttgagacagggactcattaggtttcccaggctggtctcgaacttctgggctcaagtgatcctcccgccttggccttccagtgttgggattacagggatgagccaccacatccagccttttatcttttttttttttctgagatagagtctcgctcttgtcgcccaggctgtagtgcaatggcgcgaacttggctcattgaaacctctgcctcccgggttcaagtgattctcctgcctcagcctcccaagtagctgggattacaggtgcctgccaccatgcccagctaatttttttgtatttttagtagagatggggtttcatcatgttgggcaggctggtctcaaactcctgacctcaggtgatccatccatttcggcctcccaaagtgctgggattacaggcatgagccaacatgcctggcccttttatcttctttagagttctcttttcttcttactagcacacaggttggcaaaccatgacccacaggccaaatgcagcccactgtttgtttttgtaaataaagtttcattggaacacagtaacatttgaacagtaaacacagtaacatttgaacacatttgttcaaatattatctatggctgctttcacatttacaacagcagagtcgagtagctgcaacagagaccaaatcctcctcagagcataaaatatttatttttcttttcaggagaagtataacagctcctatactatccagtccctcattattccaatcccattatagttaataatttttttatgttaaactttccctgttcaaattgttgtgtagtttctcacttctgattgaaccctgtctgatacatctccaacctctctggccgtttctcagtcaatttttgggctcccctccctctacccatttcataatgttagggttcctcaaggcttccctctgcttttagataggtttttgctctgccacccagggtggagtgcagtggcacaattctagctcactgcagcctccaactcctgactcaaacaatcctcccacctcagcctcccaaagagctgggactacagatgtgtaccaccatgcctagctaattttttagtagagataatcaatggtttttaatctagattccattatggctccaatgtgtctataaaccacctgaaattatatgcaaattttatatggatatgcaaatacacacaagtatggggagaaatttccagcttcatcttttggcaatatagctcaatagttaagggcacaatagaccctgcatacaacttggtggacaaaagtgactgcatctgggatgctaatctgcaatgctgacttcaatgttgactgcaatgttgattagccccagtcctgtgaatatctcctgattcctactttatttactgtccctagtgtaagaacatgtcaaccttgatgttattgcacaaattattatctattacacatgtagcattcttgcctgttctggagggctacctttaattgtcttgcacagagcagtttgactctttccctacagtatataaactctgagtgtggagcttacatgtacagaaatctgccacccaagcccacatttctgtctgtaaattcccacagtaaaacacccttaccaagaaactggatttgtctgcctcaacctttggtgtcttggctcctctggcatttgggggccactttgcatatagggccctctcatggaacaccacctgcttcagtttgaatcccagctctgcctctttgacctaggctagcttacacggtgcctcagttttcttgtctgtaaaatagggaaaattatagtacctacctcttagagttgttatgggaattaagagttaatatatatatataaatcattgggacagggcctggccataattaagcagtatttaagcactggctattattgccatttctggcactctcccttctccctagacggttttctgttgctctagtgcaccctgctttctctgactgtgaaccctcaggtggggtctttcctctgctcagcacactcttgtctatgttgcttgcctactaacttccctctggcctccgctcaaatgttatttcctcaaataagcctctcctgatctagaactcctctcccttgtaaaagctcccagagctttctctaatcctcctcataaccttcaccatgatttatttacagtgattacttatttaaggtcttctctgacagtccatgaactccgggcgagcagagattatgtgttcctggcttcctgctggacatcagcacagtgcctagtacactataggaatgccataaatgtttgtcaaatgcgtgaatgactgaataaggaacaaaacaaatgaaaggcttttataaagttataaaacccaatacaaatattaggtaacacaataatgagaatgtgacaaaatgtgatgattgctaggtaatctaatgttaaattggtaggaattagtattgtgtgaaggaaaccctctcctctccaatttgctataaaatatattagttcattggaacccgtgtcttttaaccaaatggaaattatgcaaaaggaccagaaaatattactgggtacaattaaggaatcacagacagatattgattggttaaaacaccctccactttcacccccaggaaataggcctcagatgaaagaaactattgaacagggaacctatttattcacagagaacatattcatggccttaattcaagacaggattaaatactttcacgagytggcaaaaccaactgtgccaatctgagatattcattgctaccctgggagttaatgtatgtgacccaagccatcaggaagacgatattctattatcaatgaacactcaaacactagaaaaatcatgatagttgccaccataattcaagatagacacaataaagtgattctcctgagaatgtcttcaaggacttattgcttcctcttctctggaaaaaggaatcctcgaggaggaagggtttacattcccccaccttcccaactgtcagacttcggaccgctcctctcctgtctaatccgcctttcatttcccagacgccaacatctgatctccaggagaaacagtgcggtaactgcctaaccaggattggggaaaactgaaccaggcactggacttgggtctggggagatagaggactgcagagatttcacaaacaccgcggtgcctagtacactataggaataagtgtactattcctatagtgtatacttttttttttccagaaaaatccctctggggtatgagcactattttcagttctggttcaacttttcattgagattctatgtggataagaggatcttgtagtgaaaaaaagataaaaagcagtgttttcatctgagtgtgagaaaccatgtgtgcctagaggtgggagaactgagtgttcagaaggcagaaaaaataactgagagctgggtgaatgatcccacaggccctaagccctagatggttggggattagcgatgtataattcaacttctgccagcgttggcggcagcgctcccacgtagccagcctgaggctgtcaagctctggactacatttcccagaaggtctgctccccgggctgtcgcaatttgaattggggcgtgtctagaaagagaagccatagtcggcgagcaacgctggagcatcccgctctggtgccgctgcagccggcagagatggttgagctcatgttcccgctgttgctcctccttctgcccttccttctgtatatggctgcgccccaaatcaggtctgtgcaaatgtattgcsttctcttgagaattcttgttgcggggcgggagggaaacatagaatccccaccaaagctttcttggaaaactcccctgggggggctccaagatggcggagcccagagttcggtgggttggaggcgaggtccagctgtcctgggtgccaggaggacacccgagaccccaggcggtgagaaagggcggcagtccggggcacactgcttttccctggcctgtttttcttttgtctaagcaccccctgattctggctccagggaatcccgagggtaaggctacctcaaacgcttgagtttcggactcttcaatgggatatggcccgacgctgttttccccttattccccacgccttaaaccagccttcgaggtacaaaggagcgattccacatttcgccctctgaaactgatagcaatcgtaacatctgcggccccatccttgctctctcgttgctgttacaatcgcttgttctgtgggcggatgttgtaaaggagaaaagtgaaaaggaagagtgtttggttatgagctctatcctgccttgcgagcaggagcacgggggatctgagttaggagctagggtactggggcggtgagggctgggagaatggtgggaaggtattgaccaggtgatagatcaatcagcccaaggctggccaagtgccccagtgaatcagcagcgggctgtaaaaccggcagcctgcttattggttctaagtaaatcaccagtggtgacggaccagtgactgaatagacagacacactccttccccaggtgggcggtcttagtcccaatagaacttgaagccaggccagatcacagtcatttcttaccacagtcacctactttccttcttttatttttattttctcttccttctctggtgcccctcttccagttatattttttctgccttctgaacactcagttctcccacctctaggcacacatggtttctcacactcagatgaaaacactgctttttatctttttttcactacaagatcctcttatccacatagaatctcaatgaaaagttgaaccagaactgaaaatagtgctcataccccagagggatttttctggaaaaaaaaaaaatatatgtgtgtatatatatatatatatgtgtgtgtgtgtatatatatatatgtgtgtgtgtgtgtrtatatatatatatatatattccaggagctgtattcccaactcagcagggttatgggagtcgggccagagctggacttttatagttgtctctttcattcctgctggttaaggagaagaaagaactaagtacaggtcctactaagttgtcactcctggagctacatacagtaaggggatgtgggaaacagcctagaggcttgttytctgaggagggaggtgatggtttgtggggaccatgagttaatctgcctccctgtcagcattttcgcactatgcaggtagcttcaatggctaagagtatgtaccttgcaattccaagttcaatgaaaaaggctgaaatgctctttaagaatgcatctcctggtcaacagattgttttaaccagagtcccaacattgccaagaagagaataggccagtctgagaaccaccaatctgtgtttgtgcattcattcatttggaaaaggcaatatagtatagtacttagaaacaagcactctaggctgggcttggtgactcacacctgtaatcccagcactttgggaggctgaggtgggcggatcacctgaggtcaggagttcgagaccatcctggccagcgtggtgaaaccctgtctctactaaaaatacaaaaattagctgggcgtggtggcgcatgggtgagggggtgagggatgagaatcgcttgaacctgggagatgggggttgcagtggaggtggaggttgcagtgagccgagatcacaccattgcactccagcctgggcaacaagagcaaaactctgtctcaaaaaaaaaaaaaagagaaagagaaagaaagaaacaaggactctaattacacaaagcaagacttgaatcccagctcccctttgtacatacataatcttctctttgttttaagtgtgtatgtgcatgcgtgtgggtgtgttttttttttcttgtttattttgtcccagagtcacaagctttcataattttaactttttgtattggattagccatttctcaaggccataaaatgccagttgtggacagattgacctacagaaactagttatttcttcttctgggctgaatcttgtgatttcctaagtcacaagtgccttagagagctcaaaccaaagccaggtgcctggctaagcaggtattcatccagttcttgtgctgcagagaacagctgtaagctttgcccttgtaatagaatcacttttgtctttgagcaaaagcagaaaacttttgtcatctttcctccaactttccttaaatggacactgtttccttaaaaggacaacagtggaaagaactaaagcaaacctcagccagaagacacagggagttgcaggaacctactggctgagacagtagaatgaagaattgatgagctctccttctctgtctgcaggaaaatgctgtccagtggggtgtgtacatcaactgttcagcttcctgggaaagtagttgtggtcacaggagctaatacaggtatcgggaaggagacagccaaagagctggctcagagaggcaagttcacctcctttcaattccytcctattactgctgttttacccctcacagtaatgatgattcattctcattgtttcttcccagttttggaattcaagaacacctaaggattccactgatttgctgatctgaaactagtactatgctctacatataatggacccttaatgaatattattaatttatttttctttacctatttgctaatcagatacctctgttgtgaagaaagggtaaaaatgtgtgttttttaaaaaaatgttggarataacattagatttataatgccagctcaaaaacagagctgaccatttctctttcatatgttggctgacaggagctcgagtatatttagcttgccgggatgtggaaaagggggaattggtggccaaagagatccagaccacgacagggaaccagcaggtgttggtgcggaaactggacctgtctgatactaagtctattcgagcttttgctaagggcttcttagctggtaagtgtagaactagagagactatgttgtgggtcttgaggtcaacatggcagattcaactaaaaggaaaaggtccctcttcctcatagaagtggtggataaaatatagccaaaaacttctgtagctgaactcatagtcactgggacacaatttatgtcaaagggatatcttccagaggcagaaacaaaaaatgaattcaaaacgtcatagcagtgagtaagagctgaagccagaaatctcatgggagtctcagcactcagtacaggctttttagggtctggggtctaaatacttacacagggataggagatgaggccacaggcctttgagagctggagctgtatttgaggttctacacaaagttgagattcacaaagggccatctggtccatagtatagaagctaataaaaatcctggccaccagctcagagacatgacaaagaagtttaccatctctttagacatagatggatacttacctgcaaaaaattagaacccgagctggcatcatgtgtggggtctgaattcgtaccaccaaatgatatgaggatatttatgggtttgatttttgtatgtgtgtgtaatactctatggaaaattaacgtaaaaacctgtagtgtctcatcaaaagcaaatccaagagcactctataggcatatccccttatagcccagggatctaggcctccaaggaaaaagctttcactggtgtgaactcatagtcataaattacaaaccacatgaggaaatgaaccatgagagagaattggaagatgcaataaagaggtgaagccagtatttatttctttggggacctgaatcccagggcagaggtacatagagaacattcttttttctcttgctttggaatctttccattcagcttgggaagtctttttattgagagaggtggatgcaacaattcccaaaagcagtgagtaagtagctcctgaactacaaggatctggaaggtcatttggtagtataaaatggaattctgccccatagtaaaagtaggtgggattcaactaaagtcttaaaatgaaaaacaatagaaaataaatatgaaggaaaaatggagggaagattgaagtcctgcatcctcattttcaaagcctgagcgtgaggcagctttctaagatgtaatagccttggctagccacttccacgctccatcgtcttgtccctgcagaggaaaagcacctccacgttttgatcaacaatgcaggagtgatgatgtgtccgtactcgaagacagcagatggctttgagatgcacataggagtcaaccacttgggtaagaaatctggccttatcacaaagctagagagacccaaaattctctttgggaaacttaggggtcagattgaggcttcttgttgtgtgattgaacctcaggaccataatagaccatgtgtgcataatagtttggtcctacctgatagctgaggaatacctgagggctgctccaggttctgcccgctttttaatctgtgatttagatttggtttgccttggcgcattttttaacagactaattggtttaggggactgtgttgctttcttagtagtgatccttgtggccagcatcaggtataggtcatctgctctttttttgtaaagacagggtcttgctatgttgcccaggctgtacttaaactcctggcctcaggcaccttcctgcctcagcctctttaagtgctgagattaccggcgtgagccaccgcacccagccaaccagctcttaagaatgagattaaccaaagtaggaatgagctgggacttcatattcacatagtctagacctatctcgctcatataaggatgcctcatgtctttggctgttgttatttccctaaaccttcattaaacttgttttctagttgataatgaaaagttggagggaaagaccttatttctgaattatctgcctcccataggtgaggcctgctcaccacgactcctgtcattcctacatggccctgaacttcattaattctagtatttctcaacaggtcacttcctcctaacccatctgctgctagagaaactaaaggaatcagccccatcaaggatagtaaatgtgtcttccctcgcacatcacctgggaaggatccacttccataacctgcagggcgagaaattctacaatgcaggcctggcctactgtcacagcaagctagccaacatcctcttcacccaggaactggcccggagactaaaaggtgggcctagaggaaatgaatgtggagacatgagtcagagagaggcaggtaaaagccacaggaatggaaactgtttccagagcccaycacctggagaggacctgcttccgtggctataattgggtacagttttagtaagtagtctacaactgaatattggaggtggctggctgggacagtgagactctgactttgagtctgaaggcctggctttactacttactagctgtgtgatctatagcaagttacttaactttttttttttttgagacgggatcttgctctgtcacccatgctggagtgcaatggtgcaatctcggctcactgccgacctccacttcccaggttcaagtgattctcctgcctcagcctcctgagtagctgggactacaggtgcgtgccaccaggcctggctaatttttgtatttttagtagagacaggatttcaccatgttggtcagggtggtcttgaactcgtgacctcaggtgatccacccaccttggcctcccagagtgctgggattttaggtgtgagccaccgcacctggccattacttaacttttaggacttccttcttcatatgtaaatgggactacttcacagtttattgtcataattaattcaggcttcataagcaagtcaagattttttactcacagtgagactgagtatgagggaaggacctgaactggcactagataaaggcagtagactaaaacaggtactgggaatatggaggggcagggtctcccttgcaaagcatcaaataagagggaaatatatgcttgagaaggggaatttccagtcacaaatacacagaggtccttagcactgtctactctggatttctaataaagagaagggaaatcgagggtgaactgtgctaggaattgaggcaggcagaatgcaggctcaaggaatcaggcacaggtgccctatagttggaataggatcatcctaccaaatgaacatctgtgagatgggaaggaaactggtggttagctcagtccttatgcccagtctgtgcccagggcatgacatcttttatcagtttaggatagataagggtaactggatggtgaaaactatccaaagagttgatcagggagctagggtggcctggaggtggaaagatgggtccagtggtgagaattcactaatacatgaatgaggtgactctgatagttgtgaggattcagtggaaaatcattatggtgcagtaaaagaaccctggtttgacagaagattcattcattcagccattcagcagacatgtattcagtgcccatgttgttccgtgcactgggttaggggacaggggatgaattggtgaacaagataggtatagtctcttctttggtttggtttacatctaacgggggagaaagacaattagcaagtctttatacaaactattaaatgtaaaatcagtctagtaatgcatgaataattctcattgtaaaaagctcaaataaggtcaggcacagtggctcacacctttaatcccaggcactttaggaggccaaaaccggaggatcacttgaggccagttcaagatcagcctgggcaaaatagtgagacctcatctcctctaccaaaaaaaaaaaaaaaagagttcaaagcatatggaagtatgtagaattaaggtgaaaaaccaccttcatttattcccctcttccccctgctcttctcccttcatatgaccattatcaacagcttgtgtgcccctttccaataattttcctatgcatttacatatgtatgtatcatgcacaaggaactgaaactccaacacagtatcttggagatctttccatttagtacatatggatttaccccttaattgtattggctgtgttgtatttcgtagtatagatgtgccttagtgtatttatgtatttccttaacaacatctggattgtttcctttttgttgtggctgtttaattataattgtgataaatgttataaaggagaagtaccaggacttacaatggattttagtgggagtcttggggggaccttattcagtctgagggttcagggaagactttcctgaagaagtgagttgcatgctgagccccgaaggatgattagaaattaaatggattagaggtactgatagaatgtggaggctgaggccgggcgcggtggctcacacctgtaatcccagcactttgggaggccgaggctggtggatcacctgaggtcaggagttcgagaacatcctggccaacttggtgaaagccctgtctctactaaaaatacaaaaattagccaggtgtggtggcgggcgcctgtaatcctagctactggagaggctgaggcaggagaatcgcctgaacctgggacagagtttgcagtgagccaagatcatgccattgcactccagcctgggcgtcacgagtaaaactctgtctgaaaaaatgaaaaaaaaaaagggccggacgtggtggctcatgcttgtaatcccagcaatttgggaggctgaggtgggtagatcacctgaggtcaggagttcaagaccagcctgaccaacatggagaaaccccatctctactaaaaatacaaaattagccgggcatgttggcgtgtgcctgtagtcccagctgctcaggaggctgaggcaggagaattgcttgaacctgggaggcagaggttgtggtgagctgagatcataccattgcaccccagcctgggcaaacaagagtgaaactccatctcaaaaaaaaaaaaaaaaaaaggaatatggaggctgagaaacattccaggcagaaggaggagaatgtacaaaggtccgggctcagtttgagaaacagcgaaggttaccattggtaggttgtagaaagcaagagtaataaagatctgagctgagactggtgaggtaggtagatgccaaacccttagaggccacagtaaggattttagtgtttattctaagagcaatgggaaackgttaaaattaaagccttttcaaaatgggggcaagaggggttgcagcagttgatttcatcagcagaggtgagaaatgagggtrgtttggactaggtggtggaattggagggtagtagaaacttctgagagagatttggtttgggaaagcttgttgactggagatgcatgctttaggtgggcattcatcagaacccttttgcctgattgggcatgtcgggaacactgcaagaaccaggtttggctttaaaagtagaaatcaatttgggacctctgagtctgcattactatgggtcatctagggagatgtcgagtaggcagttgggaataatacagctgtgtctgcagctgtcagtccacaaagaccagaaaaattctgtttcttcaaagctttacaccaaaactcatttggcagcaaaacatttcctgtactagggagattagattaataggcagtgtatgtatacatttcatattacctttctacaatcagagaaaaaaattgaagtatgtctggccccagcgttttccataaaggattgggggcctgaaatagcatgtgcaaaagtatcatttagcacttaccatgcatcaggcacttttttttttttttttttttgcaccggtgtctcactctgtcgcccaggctggagtgcagtggcacgatatcggctcactacaacctctgcctccctggttcaagtcattctcctgcctcagcctcccaagtagctgggattacaggtgcacgccaccatgcccggccaattttttctattttagtagagacggggtttcactgtgttgcccaggctggtctataactcctgagctcaggcagtccacctgccttggcctcccaaaatgctaggcttataggtgtgagccaccacgcccagctgcatcaggcactcttttaagacctttaacatatatgaactcatttaatcctcataactaccctgtgaggttgtaagtattatgattattcccattttagagatgaagaaatgagtcacaaaagggaacttgcccaaggttacacagctaatgagtggagccaggatttgaaactgggcagtctgtctacaaaatccatgcccataaccaccacattgtgttgactcccagtgtgtctgcagttcagaggagcagtttggactgyggacaaaatgtgagcaccatagaattatggagagggagtctggtgagccacgagaactccaacatttaatgtttgtgtagaagatgatgaactggtccagaaaactgagacagagcagccagaaaggttaggaaaaccagaagtggcataggcttatggaagccagtgaaaaagaagactttaagaaggggatgggcgcctgtaatcccagcactttgggaggccgaggtgggcagatcacttgaagtcaggagttcaagaccagtctggccaacatgatgaaatcccgtctccactaaaaatacaaaaattagcctggtgtggtggcgcacccctgtagtcccagctacttgggaggctgaggcaggagaatcgcttgaacctggaaggcagtggcagaaggaagatcatgccactgcactccagcctgggcaacacagcaagcctgtctcaaaaaaatgaaggggatggggtgggtgtggtggctcatgcctgtaatcctaatactttgggaggccaaggtgggaagattgtttgatgccaggagttcaagaccagcctggtcaacatagggagaccccatctctaaaaaagaagggggtggtcaacgatgttaagtgctgctgagaggatgagtcttggctctgctgattcctgacttgagtttccagtcagaaatacacagaggtccttagcactgtctactctagagccttcttagatctgtgagatggaagtataaattactgtgagcagtacttctgatgtcaccatgggcaaaagagtccatatgtgaaggtcacatgcttatttacatccttttctsttttgggctattctgcaaaatcaagtcctgtcttaccctctcttcatgccacccccaaccaggctctggcgttacgacgtattctgtacaccctggcacagtccaatctgaactggttcggcactcatctttcatgagatggatgtggtggcttttctcctttttcatcaagactcctcagcagggagcccagaccagcctgcactgtgccttaacagaaggtcttgagattctaagtgggaatcatttcaggtatgaatgttatctctttttgcagatgagatttattgctcaaaggagataatttgggtttgtctgggtatacccttttttaaaagtacattgtctcatatagcttttgtcttttaactctagagtttttaccttttagtaggggaatttgactctcttttgtaataactgctacatttgattttatgccatcttttatactgataattatgcattctgtttgttttcttcctgtctttgttatgtcagtccagttttctttattcttttttggattcctaattctattgttttacattaaaaagaatttaaaaagaatttgaggccaggcgcagtggcttacgcctgtaatctcagcactttgggaggccaaggtgggcagatcacctaaggtcaggtgaaactccgcctcaaaaaaaaaaaaaaagaatttgaatctgcatttctctattgtcctcaggattgaaatactatggactcccctctcaaataagcgaagacatttaaaatgatttaaatgtagagaattttgaatataacacagggttagataaaatagtgcactgagcctgcatataatggagcctcagctaccattaacccatggccaattctgccctatccccattctctacccctttccatatttttcttctcccatattattttgaagcaaatcccaggcatcacataagatcaaaattttaacatgtttttacctctacttcaggttattgttgaaatgacctgaaattttaaggaagtagctgaaaatagcattaagattggaaagaaaggcagacagattatgagaggcctataatgccagccttgtggaggagccccagagttgtttcagtagacagacaaaatctggtctgtgctttagcaactttgtttcatgaatgaataattaacctagtgagagagagagtttcagaaagttgtaatgaaaggaatggtaatgtgaaagaggccctgaagcagcagaatttttatcactggatgattaattaaatgaggggatgagggaggctttgctaacctgaatttcaagcctgaatgaggttgatgatgacattaactaagacagcagacatggaaaagtaatgtgtggaacttagggttcttggattccaaagcagttgaaagggactttgtctagcttaagcaagaaggaaatttattaaaatattagtagggagaggagggacccctaggttgaaagggaagactgaagagccaggctaagaagtgtcagagtggcagtcagccagccggggcattgctgctagagtgagcgaatgccagctatctttagtgtttaggttgtattgcttatcatccattctctagggaggaagcattggatctccttcctcctatcccttcatttttactcttttgattagaggcaaacagggactttattaatgctctcttcaaactatattgaggggaaaaggtaattctgcagaaggaaatcaggttgctattgccgaaacaaagtagaatgttcagccaaagagtaacagttgtccactgtgtaacaaacctggctctgtacatgttgcatgtgtgttatctataaggcatgcaagtagaaatgtatagcagatagttggaaatgtggttctgaagtataagaagatagatttatatagtatactggattgattttccaagagtgactggattcttcttccctagagattttaagaaaaaaaaaaataaccctttatcttggttttgactgagtggtttaaagaaagtcagctctaaatccataacttactattggattgacttttgaagagcctttcctgtgctatggattcttaattcattttgaagatccaacagcagccgtgtagaccaccatcaagaaatgaacataaaagtcttttgattgaagccttaagatttttgcactggctcttctttctgcctgcaaccactagtctgctttatgtctctaagaatttgcctttactggacatttcatataaatggaatcatatggtatgtggccttttgtgactgacttcttttactcagcttaatgttatcaagggtcatccatgctaaagcatgtgtcagtacttcatttctttttattgctggataacatttcattgtatagatttgccacatcttatttattcattcatcaggtgatgggcatttgggtttgcactttttagctatttgaataatactgctgtgaccatttgtgtagaaatttttgtgtggacatttctcttgggtacatggaagtggaatttctgggttatatggtaactgtgtttaactgctgaggaactgccaaacttttccaaaatgactgccccattttacattcccaccagcagtctatgagtattctaatttcttcacatcctcagcaacacttgttattgtctctccttttgagtttagccatcctagtgagtatgaaggaatatcttgtttttattttcatttcattttcctactaatgatgttgaacattctttcatgcgctttttggttcatttgtttctttgttggggaaatgtctatcaagtcctttgcccatttttaagttggataattgtctttttattgttgagttacaagagttcttaatagtctagatgcgagttccttgtcagatatataatttgcaaatattctctcattctgtgggttgtcttttaactttcttaatggtatcttttgaaatgtaaaacttaaattttgatgaagtccagtttatctattttttgtcacttgtgcagtcatatctaagaaatcattgccttacccaaggtcacaaagatttactactgtctttagtaaagacagttttctgttactaaacagaataccacagactgggtaatttctaaagaaatttacttagctcatggttcyggaggctgagaagtctaagaacatggtgcctggcatttggttagggccttcttgctgtgtcataatatggcagagggcatcacatggtgagagggcaagcaagaacaaacccactcccatgatagtgacattaatccatgtatgagggcaaagcttttattaattaatctgttcatgaaggcagagggactaagtttccaacatgtgattttttaagggatacattcaaactatagcaacccctatgttttcttctaatagtcttatagttgtagcattacataggtctgtgatctgttttgaactatttttattttattttataattattatttttttgagacggaatcttgctctgtgacccaggctgctcactgcaacctccgcctcctgggttcaagcaattctcctgtctcagcctcccgagtagctgggactacaggtgcacaccaccatgcctggctaatttttgtatttttagtagagatggggttttgccatgtaggtcaggctggtctccaactcctgacttcaagtgatccccctcctcggcctcccaaagtgctgggattataggcatgagccaccacacccggccttgaactaatttttgtatatgatatgaggtaggggtcaaccttcattcttttgcatgtggatatccagtgccttagcaccatttgttgaaaagacagttttctacccattgaattgtcttggtatctgtattagtctgttaaggctgccatagcagaatcccacagactgggtggcttaaacaatataaatttattttctcacacttctggagactgaaagtccaagatcaaggtgctggcctggttggtctctggtgaggcctgccttcctgacttccaaatggatgccttctctctgagccctcgcatggcctttcctctatgtacacacactcctggtgtctcttcctctttttataaggccctgttggattagggccccgccctgatgacctcatttaaccttagttacctccttaaaggccctctctctaaatacagtcacactgggggttagggattcaacatattaattttgggggaacacaattggagtataacagtaagcttgtcaaaaatcaattgaccataaatataagggtttatgtttcacttttctgttccgttcatttgtatgtctgtccttatgccagtatcacactatcttgattactatagcattgtagtaagttttgaaattagtttatcttttacctatactaattcttagcaaaatccccctggaaatgtcaatactgtgaccatgctgatgccataggcacacttaactagctcttacttggctgggcgcggcggctcacgcctgtaatccctgcactttgggaggctgaggtgggcaaactacttgagcccaggagttcaagaccagcctaggcaacataatgagacccyatctctataaaaaatgcaaaaattagccaggcgtggtggcgtgtccctgtggtcctggctacttgggaggctgagataggaggatcacctgagcctggggaggttgtagtgagctgcgatcacaccactgcactccagcctgggcaacagtgagaccctgtctaaaaaaaacaaccagaaagctcttgctgtagtatttgattagtttttatagcctacaaggaaccttcatgtcaactgtgttctttgctcttaactgtaaccttatgaagagtataaggcacagtgcagtggaggatgcagaggcttacaaaggctgagtcatttccagagagatacagagccttgtggttctcactgatgatcttttcactaggaaatggcaagttgtactggtcatactggtgagtcttcttaaacagaagtactgataagacttgttttgtaaacgtgacgatattttgaaatggtatttctcaaactttagtgtgttcaagagtcatctggaaaactagttgaaaatagattcctggaccacaaccctagagattctcattcagtatgtctggagtagggctggagaatttctaacaagctcccagttgatgctcctgctgctggtttgtggtgcacactttgaatcccactgtcttacttgacatagtgttaagagtttgcatatatagttaattcagacttgtcaactctttcaccttcagaatttgcttagatactgaggaagcaattttcttgaaatagtatacttttaaaaattgtttcctcacatgactaaagattgtaatacattcaatcattttttttaaaactttgactgaatgcttaccagatgtataccagatccagagaatacaaaaatgagtcagaattgtccttaagaaaattttctgcatcggaattataaaattataaaacttggaattacaggctgggtgcagtggctcatgcctgtaatcccagcactttgggaggccgaggcaggtggatcacttgaggtcaggagttcgagaccagcctggccaacatggcaaaaccctgtctctactaaaaatacaaaaattagccagtcatggtggcaggcgcctataatcccagctactctggaggctgaggcaggagaattgctcaaacctgggaggcggaggttgcagtgagctgagatcgcatcactgcactccagcctgggcgacagagtgagactccgcctccaaaaaaaaaaaaaaaacttggaattaattacagcaatgaagagagggtatatgaaacactttgctatgatttgaatgtgtccctcaaggttcatatgttggaaacttaagcctcaatacaacagtatagagaggcagggcctttaagaggtaaattaggtcacaagggcagccctcatgaatggtttaatgccattatctctggaacgggttcattatcttgggagtggttccttattaaaggatgacttgtgtccccttccctctcttgcccatgtcatgccttccatcttgttattacacagcaagaaggccttcatcagatgccagccccttgatcttggacttctcagcttccataatcataagccagtttctgtatgctcattatagttacccagtttgtcrtattctgttacagtaccacaaaatggaccaagacacctcgtaccttggttttaccatttcttttctgtgtygccttttccttttgttgttttcgaagctggctttacttctcatatgagtttactaacagtataacttcaaggagtccagaaataagcatttctttttttttttttactactccaggcatctctgaccaatgtgaatagcaggatctcagctatatgacattgtccaaggcyctgtagaatgggccttatggacttacttgaagaagatggatatacatgggtgtcaggcaggcactaatattaaattatataaataggggaatataaagaccaaatgtatgcattatatatcaaacaaagcattctgatgagaggtggtctagcgaggagatctaaaatggtaattacattttctctggctaaggactggagaatgaagagataaggacaaacactggccctgtgaagtacatggagaacatgtgatccctagttgtttttatgtcatattccttatccctggcagatggcagacttcattcttaacactgtgcttcatacctttctctttaccttccagtgactgtcatgtggcatgggtctctgcccaagctcgtaatgagactatagcaaggcggctgtgggacgtcagttgtgacctgctgggcctcccaatagactaacaggcagtgccagttggacccaagagaagactgcagcagactacacagtacttcttgtcaaaatgattctccttcaaggttttcaaaacctttagcacaaarararcaaaaccttccagccttgcctgcttggtgtccagttaaaactcagtgtactgccagattcgtctaaatgtctgtcatgtccagatttactttgcttctgttactgccagagttactagagatatcataataggataagaagaccctcatatgacctgcacagctcattttccttctgaaagaaactactacctaggagaatctaagctatagcagggatgatttatgcaaatttgaactagcttctttgttcacaattcagttcctcccaaccaaccagtcttcacttcaagagggccacactgcaacctcagcttaacatgaataacaaagactggctcaggagcagggcttgcccaggcatggtggatcaccggaggtcagtagttcaagaccagcctggccaacatggtgaaaccccacctctactaaaaattgtgtatatctttgtgtgtcttcctgtttatgtgtgccaagggagtattttcacaaagttcaaaacagccacartaatcagagatggagcaaaccagtgccatccagtctttatgcaaatgaaatgctgcaaagggaagcagattctgtatatgttggtaactacccrccaagagcacatgggtagcagggaagaagtaaaaaaagagaaggagaatactggaagataatgcmcaaaatgaagggactagttaaggattaactagccctttaaggattaactagttaaggattaatagcaaaagayattaaatatgctaacatagctatggaggaattgagggcaagcacccaggactgatgaggtcttaacaaaaaccagtgtggcaaaaaaaaaaaaaaaaaaaaaaaaaaaaatcctaaaaacaaacaaacaaaaaaaacaattcttcattcagaaaaattatcttagggactgatattggtaattatggtcaatttaataatattttggggcatttccttacattgtcttgacaagattaaaatgtctgtgccaaaattttgtattttatttggagacttcttatcaaaagtaatgctgccaaaggaagtctaaggaattagtagtgttcccatcacttgtttggagtgtgctattctaaaagattttgatttcctggaatgacaattatattttaactttggtgggggaaagagttataggaccacagtcttcacttctgatacttgtaaattaatcttttattgcacttgttttgaccattaagctatatgtttagaaatggtcattttacggaaaaattagaaaaattctgataatagtgcagaataaatgaattaatgttttacttaatttatattgaactgtcaatgacaaataaaaattctttttgattattttttgttttcatttaccagaataaaaactaagaattaaaagtttgattacagtcaaaagaagaaaacactgttcattattatggttgtgcaatgatttctcattctaaagaataatttgttccagagtctagctacagtgtaatctcaatccacatgctattaatttaggttgtgtgataatctaattgttcattcaccatttcctacttaaccttttttgacactcttcacagacactttttccacatttcttgatcatcccgggccatttttttttcctttctttttaattagagacagcgtcttgctttgttgcccaggctggcctcaaactctgggctcaagcgatcctcccaccttggcctcccaaagtgctggggtacaggtgtgagccgcagcgcccggccccaggctattgatcctttttttgcacctgccccttatttctgtactgtgacaagtcccagcattgtgctgtgggacttacacagtatactgactatcctcagacttggtcatgtctatgctcagtgcatattaagagcttaaccaaagtgtgttgaatcaacagccaatgaacttgatctaataaaaatgagggcccaggagatacaaattagcaaagcattttctcctgagcagtcatacatcttttaatatttgtaggcagtttaaaattgaactcccaagcaaacatttgagaacagacaccttgagcaaaccgtgaaatcggtgaaaataataatttattttaattttttgagatagggtcttctctgtcacccaggctggagtgtggtggcacgatctcagctcactgcaaccactgcctcccgggttcaggcgattctcctgcctcagcctcccgagtagctggggttacaggcgcccaccaccacgcttggctaatttttgtgtttttagcagagacgggggtttcaccatgttggccaggctggtcttgaactcttgacctgaagtgatccgcccgcctcggcctcccaaagtgctgggatgacgcstgagccaccatgcccgacgtgaagacaggaatttatacccatggagtgcaagaagggaccttgtaatttttaacacgtgacacttagtggcagatgagacctaatgaagccaggcccaccttccacaccagattataaattcccctggagcagagattaaatgttttattcaccaacatgcccagatccctcgcaatgcctacgcttgacaaacacctgttgtcaacaagtgcacgaggcagcctaggaggagaattagtctccacgaggagaattactcgggcctagcagctagagtatttcgaggtcatcctaactgggttccacttttgaatttttggtttttgggttttttgtttttttggagacaagatctcgctccacttgggagcaaggtctcccaaagctggagtgcagtggtgggacctcagcctccgggggtagctggggccaaaagtgcgcgccaccatgcccggttcttattttgggtttctggtagagctctcgctattgtgcccaggctggtctcgaactactgggttcaagcaatcctcccacctcggcctcccaaagtactgggattacaggcgcgagccactcgcccggccgggttccacttctgaaagcttggggagccgctgggccttccaagaaaagtgctccacctcccgacggcaggcagagcccctggcccggctatctttccagggccgaaagctaacagtcaagacgcgaaacgaggaattcgggtcagggtggcaaagcaaagcgcgatgacagtgaggacgacgtctagacgcaaacatacatcaaatcgggccgaagcccgctgtcgccgcrcgggctgaacctggcacccggagcaacgcgcgaccccgggacgagacgctctcgtccgagccaaactacatccyccggcgtgcactgcagcgcccgcccctcgccggccggcggggcccgggaggaaggcggccgcgctgccagtcccgcaggtcccctaggcccctttcgctgcggcctttccccaacccggacccggcacttctcgggttccgcgactgccgatcgccccggcgcggcaccgctccctcaggagtcgcctaggccgcgcagtctcccgacttctcgtcaggctttcgcgccggcgctccagcaatcactggctggagaaggtgggcgttccggctcgagaggaccctgccgcggctccggaagagcctcgtcctgggcggcggtggtgcggcggtcgccgttatggccactgggctgggcggctgaccgccgggctaggaaagggcccagggccccgaatctcggtggccgctgctccagcgcggcctgcgccatggcctcctccgccgcctcctcggagcatttcgagaagctgcacgagatcttccgcggcctccatgaagacctacaaggggtgcccgagcggctgctgggracggcggggaccggtgaggcgggggtgggccacgccgtggggagcgcagccctgcgcgctttggaaggaagattcycccaccttcctcccagacccgggcccgcgtctcctccctccgcgtcctcagacacgccccctagggctggcttgtcccagccccaggtctccctgctgccactgagagtaaattggacctcgggattcagttccctgggatccttctatggccttccacattttctcatcttttttcactgtggcaaatagagcagaggggcttttgcatctgcggtcctgtaatgtagagtgggtttctttcatagctgtttttgtttgttttatgcatttaaaagcactagtctcaagacaggtctagttttcaccagactgacagaggatccgtagcacagaaaaagggttaaaaacccaaaggagtcataatttgggggtgttggtaaataccagttattggagggtagagagctggcctttaaaacctgattgtggcatttagatgtggtcttgttttgaacgtttttacagctgagactgtttactaccccttaatttcatgattcaggttgctacaagttctgtctggaggagctagagttttccggccctaaatccataggaaaagctgctatagttcttggcctccggatatatagaatttgatggcaaggacaaaactttgttttattgcttttatttaagagtcagagcttgggtgtttgctcaacgaattactcaaggtcataggaattgaatgactggtgagaatgaaattcatgtatttaatatatatttattgtgaggctgctgtgtgctaggtgctggtgaattgtgaggcaccgttctaggtgctggtgaatattgcaaattacagtgaaaaagatacgaacatccccattctagtgggtaggtgataaacaatatataactattaagaggcagtgttaaagaatacaggaaagtaaatcagagtaaaagaataggggatgggacttcagttttattttattatttatcatttttttttttgagacagggtctcactctgtcacccaggctggagtgcagtggcacgatctcggctcactgcaacctccacttcccagattgaagcaattctcctgcctcagcctctggagtaatagggattacagttgcgccaccacccctagctaattatttttgtatttttagtagagacagggttttgccatgttggccaggctgatctctaactcctgacctcaagtgatccgccttctttgggacttcagttttaaatagggcggttgtgaaagtcctctctgaggagatggcgtttgaacagagacttaaatgaagtgagggagtaaaccagaaatcagggagaagtgagtgtcagaaggagggaatagcactgcaaatgcctttaagcagaaatgagcttggtgtgttcagcgaagagcaggaagttccatgtgtttgggatggagtgagcaaaggagagcgataagcagggccagatcatgtagggccttgtggaccatggtgaaagacttgtgcctttttctaaatatgatgggatgcagttaaaagatactgtgcagaagcattgtgggatctgatttatgtgattgaaaagtagactgcaggcagggtacggtggctcacacctgtaattccagcacttggggaagccgaggcgggcggrtcacttgaggtcaggagttcaagaccagcctggccaatatggtgaaaccccatctctactaaaaatacaaaaattagccgggcatggtgtcagttgcctgtagtcccagctactcaggaggctgaggcagaattgcttgaacccaggaggcggaggttgcagtgagccgagatcatgccactgaactccagcctgggcaacagatcaagactctgtatcaaaaaaaaaaaaaaaagaaaagaaaagaaaaaaaagtagactgcaggccaggcatggtggctcacacctgtaatcccagcacttggggaagctgaggcaggagtattgctgtgttgaacgattttgagaccagcctgggcaacatggtgaaacctcatctctacaaaaaataaaaaaattagccaggcatggtggtgcatgcctgtagtcccagctcctggggaggctgaggtgggaggatcacttgggccctggagctggaggttgcagtgagccaagatcgcaccactgcactctagcctggaccacagagcaagactctcccaaaaaaaaaaaaaaatgtagactgcattttcaacctggcactgaattaatttttgcaatgcccatttctataagtctaaataatgcaaaagaacattgctttgaaaaatagaaaattgaattcattattactatggtttgaatgtccccctctaaaacttatgttgacatttatttgctattttaatcgcattaagaggtgggacccataagaaatgattagaccatgagggctccatcctcagagattagattgttatcctgagagtggcttggttgttgagagagtgggttagttcagccctctcttgcttgcctgctctcttgatctgttgcccttccatcttctgccatggggtgacccatgggtagcaagaaggcccttgaaagaatcagccctctcagccttgggcttcccagcctccagaactctgagaaatacatttattttctttataaattacccagactcagctattctgttatagcaacataaagctaagatagttacattcacctttgttgtctacccagcctttttctccatcctgcaaagaggacaatcagaaatatgtgaatttcttttcttttttctttcttttttttgtttttttgagatagagtcttgctctgtcgcccaggctggagtgcagtggtacaatctcagctcactgcaacctccacctcctgggttcaagtgattctcatgcctcagccttccgagtagctgggattacaggcgcatgctaccacacctagccaatttttgtatttttagtagacacggggtttcaccatgttggccaggctggtctcaaactcctgacctcaagtgatctgcccgccacggcctcccaaagtgctaggattacaggtgtgagccactgcgcccaaccacaaaatactctaagttgctggtaacagacatagttgtttaatggataagtaaagaaaatatatacatatccctagaattataataagtccaacaactttacctcttattcactacctcattcacactgctcaataaatgtttgttgaataaattgaatttatctaagcaaacacatggtgcctcatctctgaatcctctttttctagttcagagaccacatcataaagttttcagagctttaatgcccatcatgaattattaggcacagcataatgtacataatacagtccttgcatgtagcttatgctctgtaattgaattcagtcatttttcaataaacactgagaattattatgtatcagccactgtctgggctctgaggacttccagagttcttaccttaaaaagaaacaaacggccgggcacggtggctcatg

SEQ ID NO: 94999 - DNA, 59818 bp, Homo sapiens
  misc_feature (1)...(59818): n = A,T,C or G
ctaagtagcagtcactacctaaggcataagacatcctcaaaatctatgtatcatctaaggctataataaaaaaaattaaaatgtcagtatgtataaaattaatcacttgcagaagtgagaaagtatcagtaaaccagacggctgaggagattcagaagggtaagttgaatcaaggtgactgatatgaagcctttcggacatgatggtaactaatgacctaaaactaacacctaacaaattatagtaagatggctgaaactaaaacctacgtaatggtattgtacaccatgtttaaaaaaagagtattcacaaaggtgatgatttacatggggcccagaaaaggcatccaataagtaaaaaatgaatgctcatccaaaactgtctgaaagataccacgagatctggtagatgcaaacattctaattaccagcaagatatacaatgttggatttcaggtgtgtatatacacgcatagtatattgctttttcaaagcttatataaaagatccctaaaatccatttgccccattttcatgcttacccagtgatctcattactattttagctttaaatcaagaaaaaggcatccaacatattcaggcctaccaatgtaaatgaactagtactctgacttacctgtctctaagtttggttaccatgagtcaattatcaagatcctgataaacactagaaataaaattcaagttatctgatccataaaatcctaggatgtactaattaaactactattaagagatcttgcttagatagctaattggcatccttttctaacaactttgtatgtaaaaggtttaagtataaaaggagcttttttttttaagctgcagcttgcaatttacaaaaaatgtatttttaaataaaccattttaaatctgaaatttatattacagatatttttctcacttacctttttctttgtccaccctaatgacaaccacacactcattcctgccaattcggatgagtttgttgatagaacggatacgccttctggataattcactaagaagaatcatgccttcaatgttgttgtattccagcaagctgacataagcccccatttcagcaatggatctgacattcaccatcactacatcttccacctcaggaaatttgtgttgataaaatctacaacttagacccggcattctgcaatttaaacaaaagaattaagtaagtattcagttaaggtgaaaataaaaaaaaaatcaatttccacatcctgccactgaaagaaaagatgaagaaaaaaatagttattagtcttagtcttctcatcctttgaaacttcttaagtggtaccagaaaacagataatgttcaggaaccaagctttaatttttattttgctcaacatttttgtaatgcttgggtgattctctgcctttagtttcagaggaatcataaaaaataatgaccatctataaagtactccaagacctaaggattaaaggaatacctcaagagtaaaatactactttaaggcatatcaaatgatgggaagcatcactattataactaatcagaaaactaaagctactctttgccgaagtgagcaaacattgtatacgctaccactcactatataaaggaaaaaattttctacctaaaccctaaccaatataccaaatgatacattctgtcatttattatagccaaaattacagtgtcacatgtcaaaacaacaaaaactaaaaaaattttaatcacaaaataaactaaaatgcatcctcctctcataattctttttccttgaattcacaatgtctagcttctcttatccccaatactcccaaatattcctttcttttattgaataggtatacctaatcttgagaatagctttaatctccattactacaaagttcaagtttctcttaacctccaagcattaaagatatttacaattattccctttgatccacccaacctactttcagcactactccttttatgatccacaagcctgaaatcatagcctgggtagaagcatatttaaaaaaggaagctctcaaactaatcatggctgatgattttcatgtttttctgttaaccttcactgttgtcactgctcaaaacgtaggtagtaacagaacttaaaggcctaagaaaaccttgtgaaaattcatataataacttattaattggcacctgcctatatcttctcagtggcttcccactgacttatgtatctttccactacctacagaatcctatatgatctggccattgcctatctccttgtggtacaactttctccctagttctccccattttatagattaaaaaactgaagcacaggttaagttacttgttctttcacatactgctaacaggtgatgagtcaggatttgaatccatgaagtctggatccagagtctgtcctcttatcagtaagactatattctctcaaaactattcataaatatattataattagaaacattttacttaaaaagcaacattaatatatattcagtgccagagtacataacaccaataagtgcaaactattagtactcatctgtttgacaacaaagagcagcatattaatgacagtagcagagatgtatttctttgtagggaatacaaaatccctacaaaatagggatttagcaaataaagagaagtagacattcaatggccttacccaccaagaaacagctgactgtttgtttcgtttttaaacagggcttttcgagggtgggggtggggaaactgttgttgaatatgtgtatgtaaagctctcaaatttgagagctaaaaagtttcaaattgggcataaaaataaactatgttacagaaatgtatggaacagttgcaagacatttgaccagtgaaaaccacatttacttaccaagcttctccaaacagtaaaggtgatgcttttaggggaagcaaggcttaatttgatggttaaaaaacatgggcaatcatgtaagagaatcctgaagggatatgactatgaatactatttcttcaggaggcacaagtctctttgcaacataaagggtaagtaaaggaatactgttgatggtatgttattcatagtaaagatagatagtagttaagtacaaaaagaatccataccacaaaaacctgcatattggttgacaatttttgaacatattgcctaatgaaatgctaataacttaaattttttttttaacttaaaaaaatcattccgcaatatcgaagtcacactaggtgacttcacctctttatctttttcacagcattcttattttatttggtcctcaagaagtgtcaaatcaggcaattaacatagtaaactcggggaacaactctagccttgtgttccagtccttgctctgctacttactagaagtggctgcttgggaaagataacatcctttgaactgtagtttctcatctgtgccatgtacatcacaggtttactgagggtatcacatgtatacgtaaaaacattttgaaaaccattatgtgctagtcaaacataaaatattgaaagaaaaagaaggtatttccattttgtaatataataatttgttaatttttttttcagtagctactatgtactaagcactaatgatacaacaagaaagactcttaccaggccaggcgcagtggctcacacctgtaatcccagcactttgggaggccgaggcgggtggatcacttgaaaccaggagttcgaggccagcctggtcaacatggtgaaaccccatttctactaaaaataccaaaattagctgggtgtggtggcaggcacctgtaatcccactactatagtggctgaggcaggagaatcccttgaacccaggggcagaggctacagtgagctgagatcgtgccactacactccagcctgggcaacagagactctgtctcaaaaaaaaaaagaaaaaagaaaaaagaaaaaaaaaaaagactcttacctaagtaattaagtatagagtgggaaacaaactagcaagcaaataattacaatacaaagtactatgaaagggcacagtgaagcaatgaacaggaaaggtggaacagaaatactaaattataatacttccttaagaacaaatgcttaataagtactagcgtaggagctaaactcaagtaatccgacatcaaatccagaatgtctttaacccacagaacctcaatatcacaacatgctataatactcttatgtgttctgatgtaaaaagtatcagccacctttcaaaatatatcaaccaaactccaggctaatttcaaataccctgcatagtcagttattttgcatgacaaatggtaggtaggacttctttctcaaaacagtgcatggtcaaactgctataatggatatagaagttcacattcctttccaaaatatattatgtgatggggacaactctcgtgataattctaatttggatctaacacgtattaggaatgctctctgaatgctagttcttggtataggagtgctacataagtaaagcttttatttcatcattatagttgaaaaagaaagttatcaccgaatctctacaaacattactgtgcatgagacaactacatcttttggcaccagatgaactaagaataggtagcaaagttctgtacaagtcacccccaaactattgacagagattgttccttgaataacaactcaattgaggggaaataaagacttctctgctatactttttctcgaagaaaccatgttttttgcttaataaaaatttaaaaagcctaagttttgaggataaagagacctcagcatgactgtgtatttaacccgaaaatatatccttatcttaggttttagttatgcttaactaacatagttaacctaacatatgcttaacacagttctattctcattgtcgccaaaatacgacaaactgatagtaacagtaataaactcaagtctcatttagttttggttcaaggggtgactcattcaattatcagatgaaaaactactcggaccccgctctttccaacacggtgcccgtcccacaggtttctcaggtaagaggccagtttggtttccactgagacgcaggggaaatttttggtagagctgttggggcggaagaaaagatggaattctcaagcctggaaaaagcaaagtgctcagcgtcctgagccggggttaagagttacggtgtcacagcgttctcctgagaccgccccatcgtcatggcattctcactttcggcatattgtagaggctgtacaatccactcggcccactttccttcacgagattcctctgctcgaacaacgatgcctctggaacacaggatgacctacacggagccggcgaggaggcccacgacagcgcgggtggtggcggtgctgtccagccacttcccgcgcagggacgggaaagggaggtattagcccggggcctacccgctctcgaacacccatgtcactggacacaaaccaaagtgagttcctggagaaaccgagcttgggattagtcacctgaggtatgtgtgtgattcccgcactggagcccagagccgacttcttcaatcacagagaccagacttgcttccccctcaccggccgccgatcctcctcagcgtgcgcttcgctcactccaccgcgcatgcggaacctcctcgcatscgcaagcgctgaacgaatagaggcccctcttcatcattaaccatagagtctgggtcctccgagaacaaggacgaatgtagatcatggaaggacctgaaaagtactgtttctcgctatcttagctttagctaagtaaccttcaaggcgcgagaaagacataggactccgattccttgcctctgaagaatgaatcctctttcaaagtttcagctaaccatgagatggcgctgtgaccaaagacgaaaggtggagaaagacaaggcgtgcacgcttcgctcctagtctttggcctggcgcgtgccgcgtattgcgcagccgcagggaagctggatggggaggggttgggaggcgaaccggaattgaggggtggttccgcggtgcgcgcgcctcgacatccgggcaacgcctctgttctgtcctcccccttcgtcgcctgtgacaaccggaagcggaagtgaaaatgggtgtccctgctgcctcttagcaacaagaggggtcaagtgacacaaccagctgactcccgtagaggaagacactgtggaggccagttctggagctattgcagcctcggttgcccggccggggacccgagccgaaaagttatcgtcagaatgtcgggcaaagaccgaattgaaatctttccctcgcgaatgtaagtaaaggaatgggataagccgctttcacaggtttaggaacccggagcgcggtcccttcagaccctgggccacagtgagggtccttgtttcctgggaggatcctgagcttttcccaggttcttttcttgagtctagggcgaggcttcctgacggcctcttcgcgcattcctcctgagtgaatcaggctggacgaagcgatcccagccggtaggaaaaggcgcccggccggcgggcttttgtggaggtctgctgtctttattcattaatggattcatccattccacatacccttattgagccgggcactggatttatataactgaaccgtcgccacctctgccctacagagctcacagtttacgtagccagacattcgtctggaaaggccaaggaggttttaataaatgctctgagaagggaagtttactgaggatatagaagaggtccctaagccaaagtggggatggaatcgaatcgccctagcatagccctcggattcgatcttggatccccttactcattttccaagatcccgccaaatgtcacctgctgtgagaggatatccctgtgtttctgaggcactgcttttgctctctcaccgctgcaccttgttcagacctgtgttaataccggtcatcacgctgtaaagtagatatttgtttatgtgtctttctctcccactagactgtgggctctctccaggatgaaagagtgtcttaatccatagaaggtccacaaaaaaatatttcttgaaagaactcatgcttgggaatacgctcagttgtgggctgcctttcttttggggcctgaattctttgtcaggaaaatggcatatcactgtaggtgtttggctagtttgtaaggaaaattttgacgttttctcaaatgtgcctaacaacttgctccctttctcctcctcatcctgtttatttttatttagtttgttgtttgtttgttttaataagagacagggtctcccaggctggggtgcagtggtatgatcagagctcacagcagcctcaaacccctgggctcaagtgatcctccggcctcagcctccctggcggctgagattatagatgggagccaccgcgcctggctttccctttttcttttcagtgaggaagcagaaaatcagttttgaccctgacatttagacccttttattgtggtcctatctctgtgggggtgttttgttgtttttcctcattctgtcctttgagagaatctgaggatgcttaaaataaaagttatattcaaacctgaagcccagatttctttctgcccggtgactaaatagctcttaatgaaatgaagtttttaaattttttaccttcacctgttgactttctaatagctgtttgcactaagtaggcagcaagctagttgtggggaaataaagatgaggactatcccgrggtagtgacaactgcagaactcctaggacgtgatgactcagtcaaaacttctgcactgaaagacatcgacactagtttatcttctagcaatgtaaggcctgcccctagggtgaccccaggccgccccccgccgcccccgccattaaaatgcctgcctgaaaaagctcaaagctagggggagaatttactgtttgttctagtcaacacctaattgatagacccctctcgttccctttttagagcatttacgaaacaggcttacaattgttaatatgtatctcttccaactctgaagtgtcccttcaagtatctttgaragccatttctttgaaacgtaatcatcaggagggataggggctttgtctcccagtctgtgtgagaggatagaatagtaacttactaattgccaggtagtatggcgtttacactgaccaacactttaaggtttctcttctctgactcttcttgcggctggctccctgccactcccttactctcttttttaaaatggccagtcacctctgcacaaatgagaattgagctcagccctttcccctactatcagtggtttactgaataaaatctgttttcactactttaacgaatgtctggctgggtttrtctttgayagcagtcagaataacttttttgtttttactttgraacttttactttgagactaagaggcaaaaatagacatctttgggcttaggtaagaaaatgataggctcatgaaggtgaaactactatttgaaagctctcagcttgctgattgagaggaaaatcaggtgcaggaaataatctcttctctaaatattttccccatggctggcagcaggctttttgtcatgtagtcagatgtctttgattcagctggaagaaaagtcatcatcctagctaaaggtcaaactttttgagtaggactgagcagctctgaaacatgtaaaggagcaagttttaaaagccataggctagaaaatatactggcagcttgtttcacagacatttccattcaacagtattattctgtgatgttactttcacccactttcgtaccagagaaagcaaaaacaattgtagagtggaagtaaaagacgcatgaaaaatttggagtcaacagaagtccactaaatccaggttctgctacatattagctgtaagtgtgcacgctgctcttagagtttcaggaattaaaattgcccatttcacaaagatgccattccctaggaggaaaataaaattaacatggtaaattcaattttatcaacmagtttaccttttactataaactggctggaatatgcagtactacaatttgacttaaatttgatccagctctttgagcccaagttctagtatttactatcaacaatacattatgttaaatgcacacattgagatggatagctccttctcaggctggaaactaaacgaccttcacttgataagacctcttgtgagrccagtcagtgcagagtcagccagtgataattgttctctttaaggggaggcacatgtttggggtacagtgaacrtaggttggagccttagtttgagcattgggaaagtcagtggaatcaaaagtctggttcaagtccctgccctgccttttcttcactgagtaactttgagaaagttgttttacttttctaagcctcatttttctaatctttaagttaatgtctaaagtccctttcagctatagaattgtcttagtgatcttagccctatggtaaaagattccagtataatttaagaatttggccaaatggtgtttgtttgtttttgtttttttttttttgtttttgtttttttgaggcaggttttccctctgttgcccaggctggagtgcagtgacccgatcttggctcactgcaacctctgcctgccaggttcaagtgatttttgtgcctcagactcctgagtagctgggaccacagggatgcagcaccatacccagctaatttttgtattttttggtagagatggggtttcactatgttggccagggtggtctcgaactcctgacctcaagttatccacctgcctcggcctcccaaagtgttggtattacaggtgtgagccactgcacctggccaaaaaagtttattagtacatgcgattttaaaacaccagtcatatgaaattatatccccttaaatcactgtgtctaggttatactgtgtctaggttatacaaccttattgttkaattttattacccaaacacttgtttttttgagaccgagtcttgctctgttgtccaggctgcagtgcagtggcatgatcacagctcactgcctcaacctcctgggctcaatcagtcctctcaccttagccttctttgtatatgggattaccggtgtgccctaccatgcccaggtaattttgatatttttttttttttgtagagacagggtttcaccttgtttcccaggctggtcttgaactcaagcaatctacccaccttagcctcccaaagtgctgattatagacataagccactgtaccacttaccttatttagagcattcttcctaaggtcctccaggtacttttcattagctctttttcctgcctgaaatactctttccccggaacttataactggctcctttggctgttctagtctcttaagagaggctgttcctgatcacccaatctaaagtgaacaccatgtttgcttctgtcataattccttattttaattttattgtagcatgtactactgcatggtatgacattttatttctagtcttttttttttttttttttttttttttttttttgagacagggtcttacttctacatcctcgaactgggctccacttttttcattattaaattgtatctggcatatggcagcaagaacagaaatgtcagtttctgcttgactttggtattggggcttctgatggggaaaaaaattgaaacaaggaagtgaggagacttcagtgtaaatttagcttgtcatttctcaggaatcttacgtatgtcatttgttacctagtcttttacaaattaataaaatgattgctgttaggatcttgattgatgatatcaaaacatgttaataccacacttttaatagaaaatgtggtaaattattgtggtataaaaaatgcaggccaggtgcggtggctcatgcctgtaatcctagcactttgtgaggccgaggtgggcggatcacctgaggtcaggagttcgagaccagcctgaccaacatggagaaacctgtctctactaaaaataaaaaattagccaggcatggtgacgcatgcctgtaatcccagctactcgggatgctgaggcaggagaatcgcttgaacctgggaggcagaggttgcagtgagccgagatcgcgccattgcactctagcctgggcaacaagagtgaaacttcacctcaaaaaataaaataaaatgcaaaaggtacaaaagaatatagtagtaaaaagtaaatccatatttttcatccagtcccatttatcaaaggtaactcttgccagtttttgtgaatcctttctagaactattctctgcatctatataagcacattttttccttactttgcataaataagactgttatatagacagcacatgcctatataccttcgtcttttttaatgactgtatatcattccatcataggygaactctgatgtatttagcatttagcttgtttctcccttttgctattaccataaggctggagtacccatcttttaaaccttgcacgtgtttttgtacacatgtgggaataaatttgtaggataaattcckcaaagtggaattgttggtcttgaaaataattgcatttaaaattttgatatatattagtggatagatttttaaatccttaatatacctccagtggaaactaaaacaaagatattattttaacttacaaatcaaataagtatttaaactatgttggcatcataaaataaggctcctgataacatttatgatgatttaataaatattccagatattgattataaaattgtttctgttgtaaattaataaacttttcatttatggaacactgatggtagaaatctacattattggaaaaccagttgtcttagtccattttctgctgctataacaatacttgagactgggtaatttataaagaaaaaaatttatttggttcatggttctggaggctgagaagggtgagggccttcttgctgtgttatcccatggcagaaggcgagggtgagagagaaagcaagaaagggtcgaacatgcctttttttttttttctaaagggacagggtcaggtgcagtggttcatgcccataatcccagcactttgggaagctgaggctggaggatttcatgagaccaggagttagaggctgcagcaagctatgatcataccactgcaatccagcctgggtgacagagcaagaccccatctcaaaaaataaggagtcgggccgggcatggtggctcatccctgtaatcccagtactttgggaggctgaagcaggcagatcacttaaagtcaagagttcgagatgagcctggtcagtatggtgaaaccctgtctctactaaaaatacaaaaaaatatagctgggcttggtggcatacgcctgtagttctagctacttgggaggctggggtgggagaattgcttgaacctgggaggtggaggttgcaatgagtcgagatcgcgccattgcactccagcctgggcctcacagtgagactccatctcaaaaacaacaacaacaacaacaacaaaaggagtcttgctactatcttacccatgctggacttgaactcccaggctcaagggatcctcccacttacacctgtagctgggattacaggtgtacccagatgaactcacatttaaaaccaacccactcctgcaataaggaacccagtcttaccataatgacgttaatccattcatggagggcagatcccagatgacccagtcatctcttgatggtcccacctcccaacattgttgcattggagattgtttccaacacatgaagattagggacatattcaaaccatagcatcagttaaacctgtcagctacaaattctctatatagtctcactttcatcacatcaaaggataaaggataattttaacactggtggggagggttttttttgtcttttaaacaatgagaatagatgtcttaactttgtttatgtttatatagggcacagaccatcatgaaggctcgtttaaagggagcacagacaggtcgaaacctcctgaagaaaaaatctgatgccttaactcttcgatttcgacagatcctaaagaagataatagaggtagaatgaacttttcttagaatagtatttattttagaaaaatccagcatggcccttggcattttttttttgttgttgttattttaattaatttttttctttcaaaagtaaaaataccattataagtttaacaagtgtcaaatatcaaatagttcatttaataaaatccaaactctttaatcttgcctgcaaagctccacttgatctgattggccccccgcctgcctctcttaccttatttagagcattcttcctaaggtcctccaggtacttttcattagctctttctcctgcctgaaatactctttccccagaacttataactggctcctttagctgttctagtctcttaagagaggctgttcctgatcacccaatctaaagtgaacaccatgtttgcttctctcacaattccttattttaattttattgtagcatgtactaccgcatggtatgacattttatttctagtctttttcttttttttttttttttgaggcaaggtcttactctgcagcctcaaactgggctccagtgatcctcccacctcagcctctcgagtagctgtgactacaggtgcatgctaccattctcagctcattttttttatttttagtagagacgaggtctcactatgttgcccaggctagtctttttgactcccgggctcaaacagtctttctatcttggcctccgaaagtgctgagtttacagtttttgtgttttatttttaaacctgtacgtacttaacaaaagcattttctatgagtgctgtttttatttttatttttttattttttgtggagatggggtcttgctttattacccagggtggtctcaaccacctgggctcaagtgatcattccacctcatccttccaaagcactgggattacaggtgttagccactgtgcctggccctgtactacttttgattatttgtgaagttaaggagcttttcatgcttattgacaatttgattttcttggtaaatgtcttctttttttttttggtagaggttctatgtgtattctgcctaatgtgtaaaatgttaaaaatattttttccacgccttttcttttaacttaaaaaaaaaagttaatactaggtgtggtgactcatgcctgtaatcccaacactttgggaggccgaggtgggaggatggtttgagcccaggaatttgagaccagcctgggcaacacagtgagaccttgtctctacaaaaaagaagaagaagaagaagaaaattagcagagtgtggtggcatgcacctgtagtcccagctacttgggagcctgaggcaggaggattgcctgagcctatgagtttgaagctgcagtgagctatgattacaccactgtactctagcccaggcaacaaagtaagaccttgtctcaaaaaataaaaataataaaaagttaaaaatgtttttcctttggtcaaatctgttggtctttttctttatatagcttctgagttacatataaggcttagaaaagacctaaaatgattaagaaaatattatgccacattttcttttgttgctttacagttttttttctttaaacctttatcttaattatgtctgaattttgggggcagtatgatgtgaggtaggtagctttatcattttgtactgtatagacagtagagtggtctctttactaaatttccatatagacctggggttgtttctgaatcctctagtctatttcattgacttaactgtcccaaaccagatatattaatatttccttattgtagctgtacctttttaatacttgggaaggcaactccctacccagctgacccagtttttcttctctttctgaaacattattgaatattctcaaacattaaatattccagatgtactttaaaattaatacaccattagggttttgactgcaactgcagtgaatttaagagattagtttgagtaaatcagcatgtacccattcaggaataatataggtccttcagtaaagattcagttttctgtttctcaatgcatttattctgttttaattataaaactcatagtttgtaatattgttagtgatcataaccaaaactgttaaaaattggaaatttctgtttgtcgttatcaaaccaatatttacatgcacagccagcataaaatactgatggttattaaaggaacataattatgatggaatatttccttgtaaaaggcttggttgaatctgctgttggtttatgcttttccagactaaaatgttgatgggcgaagtgatgagagaagctgccttttcactagctgaagccaagttcacagcaggtgacttcaggtaaggggactaaacggggtgttttgaagcaaaacaaagtgatttcagtctcataatttcatttaaaaagcattttttaatttagaaataagcgttaaggacaaatgatatagtaataataagaaagaattcttttaaccccatcaccttaactccactgtcatcttccacatgtaattcttacatagttgcaggcgcaggatacttagtattttagagtccattttcatttaacgttgtatcataaacatttttccttattttcaacatggctgtatgatctttctcaagatgtattttttttttctcctaatgctgggtatttgggttaattctcagttttttggaatattagggaaagtgcagtgaacatttttacacatatgtatttttgtttctactgaattattcccgtaggataaatttttgagaattggattatttaaaaggcatgaacttcatggctttggtgacatcagtaaatcctttacaaagcatacaaaatagcttgcaaatgtgttatgccaatttacatatgttatgtaattctccaaataacactatgagataggtaaggcaagcattgttattctcagttttaattaaatgccttcctgaggtcacttggctaattaggggcagaggcagaagttgttttcaaggtttctgattttattattttcctaatgacatgatgcctattatctaggagctttcactgctcttgggccttaataaggccctttgaagtggtaggctttcatttttgccagtgctggtaagatcacagcttgcattgaattttctagcagagggtggagatcaatcaatagtgtataagtggtatgtgagtgttttagggtggttatggggaagatactttctataatatttatttttgttttgttttgagattgggttatgagactggctaatttttgtatttttgagtttcaccacattgcccaggctggttttgaactcctggcctcaaacaatcctcctgcctcggcctcccaaagtgccaggattacaggcgtgagctatcgcaccctgccaggaaggcactttctggtaacatttgagaagtcacacaaagccagatggaacatagtttccagggtaaaggaattgaacgccagcttaaccaattcaatagcaaacctagaaaggagttttctctatctcacactagcagaagaatccttaaagttatatccatgtagcacacctctgactgaaaacataagcaatccacgaactttaaaatcattctttgttcttttcttactgctaatgttttgaatattgttcattctctgctttcagaggccctcctctagcngtaatgacttttctccctttttggaaaaaggacagttatcaaaacatacttaattgtgacatctcactcttggtctcatttaatgttaaaactatccagtgggtccctgtaggtttatttctgaagagtctgctaaataaagtctttctctttttctgcagcactacagttatccaaaatgtcaataaagckcaagtgaagattcgagcgaagaaagataatgtagcaggtaacgtttcaaccttttagaaaccctttggggagaaaagaggtgacattttaaaattaacctgtttatacagcaagatcttaatgtcctagtttcttccttctacttagaacaagttgattggctttacatgttaaaatcattaacaaccaggtttctaattactcaggataacttgacttttgtatagaagtgaacacttaagaaggcaggttccggctgggcacggtggctcatgcctgtaatcccagcactttgggaggccgaggtgggcgaatcacaaggtcaggagttcgagaccagcctggccaacatggtgaaaccccatctctactaataatacaaaaattagccaggtttggtggcacgcgcctgtagccccagctacttgggaggctgaggcaggagaatcgcttgaacccgggaagcggaggttccagtgagccgagattgcaccactgcactccagcctgggtgacagagcaagactctgtctaaaaataaaaaataaaaaaataaagaagtcaggttccactggatgtggtggctcacacctgtaatcccagcactttgggaggctgaggtgggcggatcacaaggtcaggagttcgagaccagcctggccaacatggtgaaaccccatctttaccaaagaatacaaaaattaggccgggtgtgatggctcacacctgtaatcccagtgctttgggaagccaaggtgggcggatcgcctgaggtcgggagttcgagaccagcctaatatggagaaatcctgtctctactaaaaatacaaaataagccagacgtggtagcgcatgcctgtaatcccagctacttgagaggctgaggcaggagactcacttggacccaggaggcagaggttgtggtgagccgagattgcgccattgtactccagcccaggcaacaagagcgaaactcatctttaaaaaaaaaaaaaaattagctgggcatggcatgtgcctgttgtcccagctactcaggaggctgaggtgggagaatcacttgaccccaggaggcggtggttgcagtgagctgaagaccacaccactgcactgcagcctgggcgacagagtgagactctgtctcaaaaaaaaaaaaagaaggcaagttcctaaattcattaattgaaaccaattacaattccatacttaagctcttgatttttgagtttgatgaaaaagaaacacagaaaacagtgattaagaaacagaayttaggccaggcgcggtggctcatacctgtaatcccagcactttgggaggtttaggcgggtggatcacctgaggtcggaagttcaagaccaaccttaccaacatggagaaaccccgtgtctactaaaaatacaaaattagccgggtgtggtggtgcatgcctgtaatcccacctattcaggaggctgaccaggagaattgcttgaacctgggaggcagaggttgcggtgaggcgagatcacgccattgcattccagcctcggcgacaagagcaaaactccgtctcagaaaaaaaaaaaaaaagagagaacttaaaggtttatgaatccatgtatgcttctgtgtttaacaggtgttactttgccagtatttgaacattaccatgaaggaactgacagtaagtgtgaaactttttgtattactttgtgtctctgggatttcctgtttcctctttaaatgaactaagttctggaaaatggtgctagatgttgagaggttcctgagttagaaatcctcttatttgatatagtcaggacaatagttgatcagttaatcaaaaggtcttaaggccgggcacaatggctcatgcctgtaatactggcactttgggaggctgaggcaggcaaatctccatctctacaaaaaatataaaaaatcagccaggtgtggtggcacgtgcctgtagtttcagctacttccagggctgaggagggaggattgcttgagctggggaggtagttgcagcgagttctgatcacgccactgcactccagcctgggctacagagcaaaaccttgtctcaaaaaagaaaaaggtcttatgctaggaagtcataaaacattatacatatcttaaaatatttcaatattttatcagaaatatatcaatgtagaatcacttgctatttaaaaaatataaggccttttgaatatgaattcactgattagacttctgtgttgtttttctgcatatcctacacccacaatgcactgcttataattcccagtttgggtctctttaaagtcaaataagatcttagacactgatgcaacctgaatgctgattctttctagatttttatagcccacttccactttttaaataactgtcttattcattccattcctagtttgacagcatattttctttccaaagtaaagtattaacttttttcatagaaacaatattcttggccaggcacagtggctcacacctgcaatcccagcactttgggaggctgaggcaggtggatcaccttagcccaggagtttgagaccagcctgggcaacatggtgaaaccccgtctccacccaaaaagttacaaaaattagctgggcctggtggcatgcgcctgtggtcccagctactcgggaggccgaggtgggaggattgcttgagcctgagaagtggagcttacagtgagctgagatcgcaccactgcactccagcctgggtggcagagtgagaccccatctcaataaataaataaacaaataatattctttcttttggcacttgtatttccttgcttcatgtgatatttaattaaatcatatagaatattaagtacatttcatacgaagaagtagagcattctagagagagtcacctgttcacagagtgtcatcgtactctgggcatcaggcagtatgattttcaaagggaataaggggcatcaagctagtgaagtgaaggttggttaaaagcttcctttgtagttatatttagaatagtattcttgtgggaaactgtatttagtagcatgctcctatagtgtttggggagtgagataggcacttcatgtttacattcaatgaagattagtgaattcatctttccatatttgttattattctgaattatctccttttggggaattttatagggaagayattttactctaattaaaaatgttgtctgactggtcctttcaggttatgaactgactggtttagccagaggtggggaacagttggctaaattaaagaggaattatgccaaagcagtggaactactggtggaactagcttctctgcaggtaagtagcaraagacctggagaactcctgtagtttgatttgtaacagtcaagtggaggagagtcaggtcttgagtcagcatatactgtgctttgtacttttaactgttcccatgatcctatgtaaagcaaacataatattttgatttctgaagtgatggcttttgtaccattgtccctactttttaaaatttatgtattttttatttttttgagatggagttttactcttgttgcccaggctggagtgcaatggcgcgacctcggctcactgcaacctctgcctcctgggttcaagtgattcttctgcctcagcctcccaagtagctgattacagacatgtgccaccatgcctggctaacttttgtattttttgtagagacagggttttgccatgtttgtcaggctggtctcgaactcctgacttcaggtgatccacccgcctcggcctcccaaagtgctaggattacaggcatgagccactgcacctggcccctacttttaatttaaaaatttatttatttttcgaaatggggtctcactgtgtcacccaggctggagtgcagtggcataatcccagctcactgcaaccttaacctcctgggcttaagtgatccgcccacctcagcctcctgagtagctgggactataggcatgccccatcacacctagctaatttttgtattttttgtagaggtggggtttcaccatgtcgtccaggctggtctcgaactcctgggctcaagtaatcagcccgcctcatccttccaaagtgctgggattataggtatgagccaccacacccggcccctgcttcttcttgttaacaaaatgtatgtgctatggtacactcttgttttttttgtttgtttgtttgtttttttctttgagacagaatcttgctctgttgcccaggctggagtgcagtgttgcgatcttggctaactgcagcctggatctcctgggctcaagcagtctcccgcctcagcctcccaagtagcttggactacaagtttgtgccacctcgcctggataatatttttgaattttttagttgagatgaggtcttgctacgttgcccaggctggtctcaaactcctggcctcaagaaatcctgccatctcagcctcccaaagtgctggaattataagtgtgagccacctcacccagcccagtttcactctttgctaagtaagaatagcaagttgatactagatttaaatgtaaatgtaaataaacatcgtttgtgcatggaagaccattttttcccctatgtggccagttagtatatatctaggttattaatgcttgattctttcttgtcatttttatgttgttatttaggtgagactatagtaaacaaattataatagtgtcaactcaagtaaagcctgttgaagcagaaatgatttgataaaggtttattgaaagccaaatgtgaggattgacccgggaagacaccaacaaagttgggtgtgttctagagtctgctacaagttggaaggcttttatgggaaagtttaggagaagggaggactcctcatacccaagttgtccttttcattggcgagtacaatacagaggtcacaatcattggctacagattacaaatacaagctaaaatgttctacatgcaagtaaatcatgaagtaaaacttcatgawtcagaaacaaatcagtgtcattttcagcgtcagtaggttgcatattaatcagtatgtcagcagtctgagaaacttaagatttccttactcagggacaggatgtaaaccatgaatcataagatccctcaatctgcccaggcaggttaatttggaaacctaccaaatgtgacatgtaggttatcaatagcatggaaatagtgttagccctatggaaatctcacaagaattttgtttttgttttgttrtgaagagacagggtcttactctgtcacccaagctggagtacagtggcacagtaatagctcactgcagcctcaaacgatcctcccatcacagattaccaagcagctgggactacaggtgcatgctactacacccagctaatttttaaaatttatttcttgtagaggcaaggtctcattgtgttgcccaggctggtcttgaactcccaacttcaagtgattctcccacctcagcctcccaaagtattggggttataggcgtgagccatgcgcccagcctaagaattttgttttttaagcatgccaaaaagaagttgtcttggttctcaaatgttttctacaagtgcagtcttagtggagtcaagtgatcagggaatgattaggaagactttgtgcttacattattaatttgttcttattttagacttcttttgttactttggatgaagctattaagataaccaacaggcgtgtaaatgccattgaacatggtgagtattaggtactgtgaggtgctttgtcacttgtccataccctccacttgtcntgaaactgctagaattcagggactgtactgaagactgaaagatgaataagatgcttcccttgcccacagtgcaaagagagaagtgtgtccatagtaaaaaaaaaaagtgttatgaagtgttctgatagaagtacttgtatgatctgggggagttacacacataggaaagtggtgacttaaaaattatggaatgttttcttcatttccagttattcatgcagttatttaagggtaggaatatttctcaagatccttagtgttttctgtagttctttctaatggttgagtgatgcaactttttgagtacattaaatatttaactttaaatcagtataagccattctccttgatttctaaaaaatttcccatttgatgcacttattttccatctcttttatttcactatttaaaaaatatgactgcttagtgttgatggtactttttgctcaataaacttagtttttattaaagaaacactcaattttaggtaagaaagcaaaatttgaagtaaagaaattcctttgcttgggaatttctatattaatgctagtgagaaatatattaactattatattaactatgtataatatgatatattaactatattgttagaaatatattaactgttatattaactatatattaactatattaatgttagtgagaaagttacctcattttttaaaaaacctttttgactgcttgctagtgccaggccttgtacatgaaagtggaagcaaagaaaaaaaaaaaaaaaaggataattcgtagttcttaccctcagagttcacattctagaagctgaacaggtaaactatgtaaagtcgagcctaatgacgtaaactcaatcgagcattctctctgctcgattttttaacagttgattgctactatatttaaaataacatctgtgcttcaatgttatatattcatagaattcagcacattcagtgttgtatttgttatggtccaataggttatctatgcatagaaaagacactagaagggtatacaccaccatgtttacagtagttactcttttggatggttggattatactctattttactttttttctttgtgtttttttttattttattttatttatttatttatttatttatttatttattttattgatcattcttgggtgtttctcacagagggggatttggcaggtcataggacaatagtggagggaaggtcagcagataaacaagtgaacaaaggtctctggttttcctaggcagaggaccctgmagacttccgcagtgtttgtgtccgtgggtacttgagattagggagtggtgatgactcttaacgagcatgctgccttcaagcatctgtttaacaaagcacatcttgcaccgcccttaatccatttaaccctgagtggacacagcacatgtttcagagagcacagggttgggggtaaggtcatagatcaacaggatcccaaagcagaagaatttttcttagtacagaacaaaatgaaaagtctcccatgtctacttctttctacacagacacagcaaccatccgatttctctatcttttccccacctttcccccttttctattccacaaaaccgccattgtcatcatggcctgttctcagtgagctgttgggtacacctcccagacggggtggtggccgggcagaggggctcctcacttcccaataggggtggccgggcagaggcgcccctcacctcccggacagggtggctggcctggcgggggctgacccccccacctccctcccggacggggcggctggccaggcggggggctgaccccccccacctccctcccggacggggcggctggccgggccgggggctgaccccccaacctccctcctggacggggtggctgctgggcggagacgctcctcacttcccagacggggcggctgccgggcggaggggctcctcacttctcagatggggcggctgccgggtggagggtctcctcacttctcagacggggtggccgggcagagacgctcctcacctcccagaaggggcggtggggcagaggcgctccccacatctcagacgatgggcggccgggcagagacgctcctcacttcctagatgggatggcggccagtcacagacgctcctcactttccagactgggcagccaggcagaggggctcctcacatcccagacgatgggcggccaggcagagaggctcctcacttcccagaccgggtggcggctgggcagaggctgcaatctcggcactttgggaggccaaggcaggcggctgggaggtggaggttgtagcgagccgagatcacgccactgcactccagcctgggcaccattgagcactgagtgaacgagactccatctgcaatcccggcacctcgggaggccgaggctggcggatcactcgcagttaggagctggagaccagcctkgccaacacagcgaaaccccgtctccaccaaaaaaatacgaaaaccagtcaggcgtggcggcacgcgcctgcaatcgcaggcactcggcaggctgaggcaggagaatcaggcagggaggttgcagtgagctgagatggcagcagtacagtccagcttcggctcggcatcagagggagaccgtggggagagggagagggggagggggagaggaagagcttctttgtgtttttattttccaagttctctgcattaaatgcacattaattttacaattaggaaaaaataactgttatacaaatgagcactgataatttgaaaaaaggggtttgaagttctcacacatattatttttttttttattctagtcatcattccccggattgaacgtactcttgcttatatcatcacagagctggatgagagagagcgagaagagttctataggtttgttgaaattggcagttattgatcatcttttgttttccatattccaaaggctgtatttgctgaatgacttgttggtttatgttctttagaattagcacagcttatgttttattctgataaataagcagcaagaaatattattaccagaagttgtggaaacaaatctgtcaaattttacatgtacctataacatggcatttccaaaaacttaggcctttcagagaaactgtttaggtttgattttttttttaaatatatgttttaagatagtcaaatgcagtagtgaaaagtggggaaagagtagaacaaggagtttgatctgtaactgattgtgcgtaatagagagaactcattacctttggacaagccaagactgaattattcttttttttttttttttttttgtgagacagagtcttgctctgtcacccaggctggagtgcaatggttcgatcttggctcatgtgtcaccatgcctggataatttttttgtacttttagtagagatggtgtttcaccatgttggccaggctggtctcaaaactcctgacctcaagcaatccacctgccttggcctgccaaagtgctgggattacacgcatgagccmccgtgcctggcccttgattattctttaaaatgaaatgatgatttagattgggtgcctcctacataaaaactgagagaagaaactagaattcagctgttattcaacaaatatgtatttcatgttcaggagaaggtataaagcacctggaggcattaccaaatagtatataaatcacgccattagagaattagcacagcacttggagagaaattatgcatgtccatgaattggttatgaacatttagagtcaacaggtataaatactaaactggtagtgtacagggatctgtatactcggttcagagaaatgggaggtaggtgagggcaggagtatttaggaaaggcatggggggtcttagacctggagttagcatctaactatggtctataatcttaattatcaaaggttagtttctgtccttccatgatactcagggttgtgttgagccaaaattttaaaaaaatgcctgaatgctcaaaatctgttccattcgagaatggatttcaaaatttaacctaataaaggcttctaggctgggctcggtggctcatgcctgtaatcccagcactttgggaggccaaggcgggtggatcacaaggtcaggagttcaagaccagcctggccaagatggtgaaaccctccgtctctactaaaaatacaaaaaattagccaggtgtggcagcatgcgcctgtattcccagctactcgggaggctgaggcaaggaattgcttgaacgcaaaggtggaggttgtagtgagccaagattgcgtgcgccactgcactccaccctgggcgacagagcaagactccatctcaaaaaaaaaaaaaaaaaaaggcttctgtctcaggttaaatcagttattagcttaaaattatgtatttttagcttaaaattatgttttttaaaaaggattataaataaattactgaaaatgaaattaataaaagtaccaggtttttttctaggtatgtgtttattatccttgttacaaaactcaaagaaatcaaatctacttaatattgaaacagtgtttaaaaaatccacccccacctgtattttacaggttaaagaaaatacaagagaagaaaaagattctaaaggaaaaatctgagaaggacttggagcaaaggagagcagctggagaggtgttggagcctgctaatcttctggctgaagagaaggacgaggatcttctatttgaataatctttcctgttctggttctttgagaaaccctaacactggcttcattttaattcacagtgtgtaggtttgatttgtgtggctattkattttttggcctaagaatttcactggttgtaaaatttacctagatgtctatttatgggattacttttgcagaatcataatttagcaaccatttatcatggatgaaagagatctgtaaaacctgcccaggaacttacagaatttactttgcagaagcgttatcatactccatttacatctgtgttacacgtgatctgcttaccaagcatattaggaaatacctcttaggaagcattagcggtctcaggccaattactgtggagcagctttcattcctacccacttgcaaaccttggcgctgttgtctgagattgctgcagccattcttgttaccatggtacttctcaaactttgtgaaaacctgcacttttccttgcatgacaggttcctgtcttgtctgtcatgggagccattctgccaatttaaatgcgactgtggtataaacagtaaaatgatttaaaagtaagtcattccgtttttattaatttactgttaagtcatgttctcatgctcagatcagtagtgtcagccagagctttctctgcagacatgtaggaagtgggtagctatttttcccactccatgtattagagttttacaaaaaggcttacttttgagacaactgttgcattttggggtactaataaatgattgccgatgagttatgagggcattataatacttccttatttgctaattaagaaaataactagttcctattttagagtaagaaataaggtaactttttactatttataagtgataaaaacttgctttcatatatgaagatgaagcatttgagtggccacatcaggtgtctgaggtttttagtactgtttgatttggcatgagccatccatggggactcagtctttctcrcatccatttccaggcatttttgacatgattagccatggaataatgtttagtwctgaaattgtgacactgtctttattaatactgtattttaatcaagtgacatcacagtccaggtagtttttctttcttttttttttttttgaaacagagtctcactcattctgtagcccaggctagagtgcagtggcagcaacatcagttcactgcaacgtccgcctcctcaattcaagagattctcctgcttcagtctcccgagtagctgggattacaggtttgcgccaccatgcccggctaatgtttatatttttagtggagatggggtttcaccatgttggccaggctggtcttgaactcctgacctcaagtaatctgcctgcctcggcctcccaaagtgctgggattacaggcataagccaccatgcccagccagtctaggcagttttaaagtactaaatgattttgcaagcatttaacatctcctataagatagcaggtcttagttatgtgccaggcactggtattaagtattttgtttatattacttcattacaacaaccataagaggcacatattattttaaccccctattttacagaggaaaaattgkagacacaggaaacttgagtagtcttaagttaaaaagctagaaagtagcaaatccagaatttaagtctaagcagtctaccttcagartttttacaccctaacttttcctttctgtttcatctatatttcaaactttgggtatttaaagacattgggactgttctggagaagctgatatttaggaaatctggttgctgctcacagaataaaatcttaggttcagtgtaaattcagtaatgactggaaaaccaacaactcagttcacaagtactttaaaaataggtaactgtttaacatttcgtcttcccaacagcctgctgaactgtaaattctaccatctccactttgcagatgaggaaattgagactttgacaagtcaaagagcacagctggaatgcaagtcaagtatgatttgatttaatttgatctttatattttaagaattacgtactgcctttctaggaggcaaaaattagtttgaagtagggatccagattagtggttttccacatgtaggtaaattcaatgtaaagcaacaagccaaaggaccctagatttctcctgtggcttcttaaatacctggaatgtattggccttgttaaaatacttacaaaagtgcagatgactttatagtttagcatttgttaaaaagaaatcaagaaaacaatggacacataatttgttgtgtggagtcagttatctgaaacataggagaagaatatagatcaggaataggaatggaaagctgaactgtggtgacaggtgtatatatgtaagaaactttttgtttgttggtgtatgatttatgacctttgggagatgtacagcagaaaaaaaggagaaatgaagactggagaaacaaaatatgttatatatttgccaataattcacatgctgcctcagtgtcctcagatcccaggctgcacataaggtccatttgcctgagtattattacatacctccttctccagaaaactttcaagttcacagccttgcgttgtccatctttaatacacttagttgttggttttaataattaaggaaacaggacctacctatacctgtgccaacagggggcactatccctctgtaaagaacaaatcaaaaagtattttgtgttgtagctggaggatccaatggtcttgcttttggcaaaaacttgaagaggagggtggtctttacatgtgtggaaaccttgagtggccgagcaaatagcaagagaaattgcttagtggcttttaaaatttgaaatataattttactttttatttttacaatacagtgtacagtatgacatctcaaaataacagtgcagatacaggaaaagagtacaaagggggattaacaacagatgtcagaaggttacctttattaaggctaaatccctgctttatattttccacacattcacaaaattacattcaaatcattccttattgatccttatttcttaggccatgagaaaaggaagataatccagacattagattttcatagaaagcaaatctggattagtctaaataatattctccttccatttgttctgacaacgaaaatttgagaaacaaagttatgcaccaacctaaaacttccttatttggattttccaagtacatagcattagttattgatatcatttctatattaaatggtaagacctcccccacactggggtctccagtcagaaccacagagggacaggaaatggaattggccagagtggctgtacaactaggtgtacagcaaggcttttttccatattcttttgtggaggtcagcaacaactcagttttcactttaaggactatgttgaatatcagcacatcctcatcactaggatttagaaaagtttaggacatttctatctaccattgctgatgaggaaggggagaatgattgatagacttcactgaccttgaaatatttatcatctcagacttcctaaaagtatggcatggcatcacctctgccttgatacaagatctgcttgttaaagccatgttcctgaatcttgacagcacatggccctagtgcaggcctaatgtctacagcrggcacaagagccactcactgacactacctacaccctcactctaacttaacatgaactgccaatagtttagctcttggagttgaaaacagttgtcagttacaataagcaggatcacaaaactccattgtcaaccatagactacacttcattcctgagacgtaaactggaaaactgaaaagattaagtaagtgctaagtatattccttagtttttaatgctaaaaatcggtgtgacctgtgaaatttcctggctctaaactggagtatttcagatctgaagagacagtagtgtatggcattccttccctcaacccaagaatgttattttcttcctaaggaacattatcttgaaaatatttccacataaaacactctccagccaacttaataggccatgcaaatttgaacagaaaaaggcgacatataaactgtctacatttgttcaaataaaattatgtagaagaaaaaaaatcaatyaaatatgtacatgacacaaattactccttaaacataattgcttatgttaaattaaatgatgtcagtattattccagtgtttagctctgggtataggaaatgctgtagctaaagtcaccataaaaataaaatcaaggcattcacatttgaggttgtttgttacacatcacactatcctaaaggcttgaaaagactgcaaattaagtttccatgccaattatatacgttgaattttaaagctacagctatagagacagtacgaaaatcctattagcttaaatgtttcttttatgatttaccaagctgttgcattctcgtcataagaggcagaccttgttaggttaaaaacctatttctatatatttaatacctttttctctccaatattcttttcctaaaatgttcaaatgactttcaggtcttccyttccttttgatcttaaagtcaactgtcataatatttcccaaggacatatataattttattctaatgctaaacaagtgttttcaatgaccatttgttgatctattaaatattaatatacagtacagcagctatattcatcaacagaattccagtttattacctatatatacgtagcacagtcataggatactgtgctcatacataaaaatgcaaaaactgtcaaatgtgctatcctcccatgtatacaaaaaactattagcatcatgaggaagaaactttttamgtcaatacagattataatgaacacctgccattcataaaaatgtaacatacattctattatactatgctgatgagggaagggaagctaagtgagtaaatcagttgagacgacttaagaaaaaaattcaggaaatcataatttaaaaaagatcagcatattttgtatacctttaagtagattagagtgtgttgagtgtagagtctgatccacaaagtytgagcaaaaaaactggtgcttctaatggaatgttttttgtttttttaagaatcaaaagacatataaatgaattcragcctaacaaagtagcttcaacccaaagtggcaccattttgttttttatttttcctttttaggaaagtatctctgatgactamattagtttcctaagcaaatactgccttgcccagtgcatagaagcacagtccctctgctcaatattcccaatgaagtcatttaagtgttaatgatttaacacttaagaataatcacatcaatatttgtgtgagacatggacgcttgtgtatacaagtttttcacagagatacaactaagcagaaagggtttaggtgaaaacaaaaggttttaacaggacaaaatggaatgctctgttgaaagcttccatttagaatcccaaaatgaggcaagaaccgctaaagccatgtatagagaataaaggatgccatgcacaaactgcctaagggaactgtcgtctcactaattcaagagatctaagaacagatctacagcttatactgctgccttccatcttatcctcaatcttgctgcagtgtcgggcagtcctcctattggcagtttttgccagatcaagtccaacatgccacagaatggatgtttctttcacctcagccaagtggatggtacccactgaggttcagtatcaagtttgttaattaacctaagcaattcctgataggctttatcaagatcggaattcacaattgccgtatcaaagtagtggccattgttctgctccatctctcttgtcttctcaatgatttctctcaactcttcaggctgcaaacagaagataaaaactgtgagataattcctttcctaaccaaataatataggatgagtcagagatggccaaagaacaaggagcgaccttcatagctttccttctgtctctcccaacctcaggagctcctttccaaccctgtcacggccacaatggttacctttgctttggcatcttcacgactcatattatgaaccatctgggactcaatatatcctgttttataccactatttaggttttcacatattttgtcttatctcaccaacaaaactacaagcttcaagaacacacactgtttccctacaaacatttgttttcaaacattctagacactataacctcttcctaatagtaacatctgtaatatggagtgaacctttctggttggagcaaggacctaaaatgccatttacttttggctctagtaaagagcccttgccctatactatctgctgcagagagttaaaagtatcctaccagagtttgggaaactatatagagtagcctactttaaaatactgactgaaggaaagggccattttacaaagataagcaggcagcaaggctmtgtgcaaaacttatcctgaaccctctaattatcaggcacatgggttcaagaaagtgaaactcacctcaaatcacccctgccaatgaagacaactaacttaaactcaagacaaaatgtctcagatataaaagtcacacatcaatactatattggacccatagtacaaaacaatttatatcattcaactgtttgaacttctgtaacagtaagaaaacatattaaaaatatgacaactctggcttgtcctgaggcagtttcttgcatgactctcattctggaatgttgtacatctgaatatggcacacagaatcctttgttcccagcagggaatctacttcaccactgtaactgaacacactgacatttttgctaaaacttatgtctaccgtaagctcaagattattggaagaacattctaggactccacagagaactgaaactttgtggtattggagttgaaatgaaaatgataaagcccgaatccacctagtttttatcaaatttaaggcattgttattccattttgtgccaaaatggcttatatcacttatttagtacttcatgtctgaagttctctttcaaattacaatccacgactaagatgaaacaaaatgttttagctcaaaatttttagctgaactaggcaaaactgacaataagttcatactgctagatagccactctcaagccttcatactagcagaacagattcagagattcagaatgcaactagataaccggttggttacattttgtaacgccatcattttcttagcacaattttatagagttaaaattgaaaatctgttttacttcagcacttctatcattgagtaataaagcactattagaaataccaataccagcgcaggggctcccccgcctgtaatctcagcactttgggaggccaaggtaggtgratcacatggggccgggagcttgagaccagcctggccaacagggcaaaaccccgtctctattaaaaatacaaaaaatagccaggcgtgatggtgcacatctgtaatcccagctacttgggaggctgaggcatgagaatcacttaaacccaggaagcagaggttgcagtgaaccaagattgtgccactgcactccagcctgggcgacagagtgagactctgtctcaaaaaaaagaaagaaatatcacaggagaaaaaaacttaagtagaataaatacaatcagatacaccatcctctacaccaaaaactgtggaatacacatcctaacaggtgtgcacagaacattcaccaagaaagaacagatgttgggccataaaataaggctcaacaaatttgaaaagactgacatctttcagggtctgaccacctggaattataaatcagttaaaatctttttcacatctccaaataggtggaaactatataacatacttctaaataactcatgtgttaaagagaaaaacaaggaagcggggtgccgggggctcaggcccataatcccagcactttggaaggctgaggcaggtggatcacctgaggtcgggagtttgggaccagcctgaccaacatggagaaaccccatctctactaaaaatacaaaattagctgggcgtggtggtgcatgcctataatcccagctactcgggaggctgaggcaagagaattgcttgaacccgggaggcagaggttgcagtgagcagagatagtgccactgcactccagcctgggcaacaagagcgaaaccccrtctcaaaaaaaaaaaaaaaaaaaatgaagggaaattagaaaatacttctaacaaaatggtaacaaaaatacaatgccaaaacttacgggatgcaactaaagaactgtttcgagggaaatttataatttcaaatgcctacatttgaaaagaagagtttaaaaattaagcattcatcttgagaaactaaagcaagtgcaaattatagtcaaagaaagcataaaaagaaatgaattaaatagaaaagagacaataaagacaaatgccctccaacttatttcttttgctaaagtgtctgattattccttttgataataataataataatwattattattattatttatttcctggttccagattgtgtctttattcctctttctgacagacagcagagcatttgtctggcatatattctctcttaccacaatatagatgattttctgtgactttaacaatacatacaagaaaaaaatcacatctttatgccaataccattctttcacaatactagaagaacagattcagagtacaattacataactggttggttacattttgcatccagtgagtaacaccatcatcttcttagtttctatatctatttatttatttatttatttatttatttatttatttatttatttttgagaccaagtcttgctgtgttgcccaggctggagtgcagtagcacgaactcggcctcttcagtagccagtaccacaggcgtgcaccaccatgcctggctaatgttttttgtatttttagtagagacaggatttcactatgttgcccaggctggtctcgaactcctggcctcaagtgatgcgtccgccgtatctcaaaataataagagctatttatgacaaacccacagccaatatcatactgaatggacaaaaactggaagcattccctttgaaaactggcgcaagacagggatgccctctctcaccactcctattcaacacagtgttggaagttctggccagggcaatcaggcaggagaaagaaataaagggtattcaattaggaaaagaggaagtcgaattatccctgtttgcagatgacatgattgtacatgtagaaaactccatcgtctcagcccaaaatctccttaagctgataagcaacttcagcaaagtctcaggatacaaaatcaatgtgcagaaatcacaagcattcctatacatcaataacagacaaagagagagccaaatcatgagtgaactcccattcacaattgctacaaagagaataaaatacctaggaatccaacttacaagggatgtgaaggacctcttcaaggagaactacaaaccactgctcaaccaagtaaaagaggaccaaacaaatggaagaacattccatgctcatggatgggaagaatcaatattgtgaaaatggccatactgcccaaggtaatttatagattcaatgccatccccatcaagctaccaatgactttcttcacagaattggaaaaaactactttaaagttcatatggaaccaaaaaagagcctgcattgccaagacaaccctaagccaaaagaataaagctgaaggcatcaccctatccaacttcaaactatactacaaggctacagtaaccaaaacagcatgctactggtaccaaaacagagatayagaccaatggaacagaacagagccctcagaaatartaccacacatctacaaycatctgatctttgacaaacctgacaaaaagaagaaatggggaaaggatgccctatttaataaatggtgctgggaaaactggctagccatatgtagaaagctgaaactggatcccttccttacaccttatacaaaagttaattcaagatggattaaagacttaaatgttagacctaaaaccagaaaaaccctagaagaaaacctaggcaataccattcaggacataggcatgggcaaggacttcatgactaaaacaccaaaagcaatggcaacaaaactcaaaattgacaaatgggatctaattaaagagcttctgcacagcaaaagaaactaccatcagagtgaataggcaacctacagaatgggagaaaatttttaccatctacccatctgacaaagggctaatatccagaatctacaaagaacttaaacaaatttccaagaaaaaatcaaacaatcccatcaaaaagtgggcaaaggatatgaacagacacttctcaaaagaagacattcatgcagccaacagacacatgaaaaaatgctcatcatcactggccatcagagaaatgcaaatcaaaaccacaatgagataccatctcacaccagttagaatggcgatcattaaaaagtcggaaacaacaggtgctggagaggatgtggagaaataggaacacttttacactgttggtgggaccgtaaactagttcaaccattgtggaagacagtgtggtgattcctcaaggatctagaactagaaataccatttgacccagccatcccattactgggtatatacccaaaggattataaatcatgctgctataaagacacatgcacacgtacattgactgcagcactatttacgatagcaaagacttggaaccaacccaaatcaatgatagactggattaagaaaatgtggcacatatacaccatggaatactatgcagccaaaaaaaggatgagttcatgtcttttgtagggacatggatgaagctggaaaccatcattctgagaaaactatcacaaggacagaaaaccaaacactgcatgttctcactcataagtgggaactgaacaatgagaacaccaggacacagggtggggaacatcacacactggggcctgttgtggggtggggggagaggggagggatagcattaggagatatacctaatgtaaatgacgagttaacgggtgcagcacaccaacatggcacatgtatacatacgtaacaaacctgcatgttgtgcacatgtaccctagaacttaaagtataataaaaaaataaaaaaataaaataaaaatacatttaaaaccttccccccacaccccggaaaaaaaaaaagtgatccgtcctccttggcctctgaaaatgctgggattacaggtgtgagccactgtaccccgccttttatatcaatttagtaaactaaaaacagtttagcagttttttatacaattaaaacatacatttacctcacttgatccggcaattctactcctaggtgtttatccaagagaaatgaaaacataggtctacaaaaagactttatgaatgtttagagcagcttcagtcatactagctcaaaaaaaattttttctttttttttgagagtcttactctgttgcccaggcaggagtgcagtggcgcaatcccggttcactgcaacctccacctcccgggttcaagtgattctccggcctcagcctcccaagtagctgggattacaggtgcatgccaccacacccggctaacttttgtatttttagtagagacggggtttcactatgttagccaggctggtctcaaactcctcacctcaagtgatctgcccgcctcggcctcccaaagtgctgggattacaggcgtgagccactgtgcccggccctcaaaattttatccaaatattttttaactgaagaatggataaattgtggtatattaatatcatagtatattactcagcattaagagggaatgaactgctgttagatgcaacacagatcaatctcaaaaacatgttgatcaaaagccagacacaaactttaacaaacggcatgcttctatttatatgaacttctagaacagatcaaacaaatctatagtgacagaaagcagattagtggttgccagaaagaaagaatggaggggtattaacttcaaaggggcataagaaaactatctagagtgatagaaatgttctaaatcttgattggcatggtggttacacaggtacacatttccaaaacttgctgaattatacaactaaaatgcatgtattgtaggtaaaatatacttcagcaaagtaaaagaatcagaaagttctaattagaaaatcaaatatattgcatattgttaaaacattttggtactgatcaacttcctgctttaaaaatatgtataagctaggacctgtggcacatgcctatactgagacgggagggtcacttgactccaggagttcaaggctatgatcatgccacagcactctagtctgggtgacatatagaatctcctctcaaaaaaaaaaaaaaaaaaaaaaaaaaaaaaaaaaaaaatcagacctaaattgaaattttaggatggccaattcaaagtgaagtagataaaaattccattagaacacggccagagaccaaccaaaagaaagatgctggccgggcacggtggctcacgcctktwatcccaktactttgggaggccgaggaggctggatcacgaggtcacgagatcgagaccatcctggctaacacggtgaaacccagtctctactaaaaatacaaaaaaaaaaaaaaaaaaagaaaagagccgggtgtggtggcaggtgcctgtaatcccagctactcgggaggctgaggcagaagaatagctcgaacccaggaggcggaggttgcagtgagccaagattacgccactgcattccagcctgggcgacagagtaagactctgtctcaaaaaaaaaaaaagatgcttaacatgtttaacatgttttggaatggtctatggcccttcatatgatagcaaatccttgttggaaaaaaagatagcctaaaaagaaataagtgtgcatgttaggaagtggaaaattaggctgaacaggaagcatggagtacactctggtccttagtgcgcatccttttccttgaacaaccatggagtttctgttctaccaaagtagttattggacactaaattttacacagtattaatctcgtttctcttgttatattgtgatcctcctcaagaacagccagtgaccatgctgcctatttcctttgtatcatcccaagtgctatggacaacaaatactctgaccccagttacttaagaatttgtaggtatatggcggaaatgaaaaaggggtgcagcactactttaaccagctagcctacttagcctagacaaagcaaccagaattatgctcatcatgtaggatgatatatatatatcatttcttaacctcacatatagattaagaaatgttaagtagacatagagtgaaaaaagatattttggagggtgaagaggaagaggaagggttaatgtgttgtggtggacagtcaagaatgaaaggaggctgggcctggtggctcacgcctgtaatcccagcactttgggaggccaaggcgggtggatcacaaggtcaggagatcaagaccatcctggctaacatggtgaaatcctgtctctactaaaaatacaaaaaaattagccaggcatgatggtgggcacctgtagtcccagctgctagggaggctgaggcaggagaatggcgtgaacctgggaggcggagcttgcagtcagccgagattgcgctactgcactccagcctgggtgacagagcaagactcagtctcaaaaaaaaaaaaaaaaaaaaaaaaatgaaaggaaggctgggcgtggtagcttacacctgcaatccaagaactttgggaggctgaggcaggaaggagggtttcttgaggccaggagttcaataccaacctggcaacatagcgagaccctgtctctataaaatacataaaaaattagccaggcatggtggtgcatggctatagtcccagccacttggacaggctggggtgagaggatcacgtgggcccagagtctgcgcctgcagtgagccatgaacatgccactacactccagcctgggcaatagagtaagaccctatttcaaaacagcaacgaccaaaacaacaacaacaacaaaaaaaacaatcaaaagaaaggagtgtaaatatgcttttaatgactatctttaaggagatttaaaggcatagtcaatgaaatgaggcaatctgagtgagccctctcaaaagtagatctatttaataaatatggagcaaaaaaaacaaggaagaacatgttactctgatacagtaagtcacctgacagagttaccatcttacatatttaaataaaaagtcaatgctgtcttattaataacatgttatcagtcaawtattaatgtttaatatgacatggactacctcaaccatatctagcatagatctaaaataatttaaaaaaatttttctgttccaaaccatgtgagaagaccaaagggagaaaaaaagcagaacataaagtttcagtgggataaaaagaagagaaaagcaagagcactcaaatttggctccctgaaaatgtggagtatctacagagaaaagtcagtaatcctgaagagttggctgataactttggtggcagtcacatctccctagaaatgtcacagacccatgtgaagacgctcaaaggttaccaaatgtagatgccccaactttggaaagctgccatagtccaacccagtggcaaccatggcaatttttgggcaagtaatattacagaaaaaataatcagtttgaaagctcaagctaatgtagcttttaagcaccaggacaaattagaccaggactgtttcatgtttaccttcaatggaatagtacaatagtgtgaaaactttacctttggattcttgccttctttggccaataatgcccgaagtctttcttgtgaagggggtgcaatgaagataatatatggtttcaaatctgaattccggagagtcttcaatgactgtaaagagacattttgatttttaaaataatttgcatcatttaattacttcctaataatactgatatatatatatatatatatatwwgattaagggacttgctctgttgcctaggctagagtgcagtggtgtgatcacagctctctgcaacctcaatctgctgcactcaagtggcccctcatctcagcatccccagtagctaggactataggcatgcaccaccatgttcagctaactttttacttttttgtagagacaggatctcgctttgttgtccaggctggtcttgaactcctggcctcaagcaatgctcctgccttggtctctcccaaagtgctgggattacaggcatgagccactgcacctggcccaattcacaatatttttaagatcctaccattcactgtaagaatatactgtgaagccatatatatatatacacacacacacacacacacacacamgtgtatatatgtgtatatatgtatatatatacacatataatacatattatatacatataattttagcttgctcttttatgtaatgaaatgtaagtgaatgatactgaaggatgacaactatgtgatattaaaacacctagttttaataataagatcacatacagattacaataaccatattaaaaatcaattttggagcaattagaatcatacaagttgccttactatgtgccagacactaaatataagcaaaatcatagaacataacttcacatgtgcaagacaattcaagaaaagcacatccaagaaaaagtagactatgtttgaatctggagattgcagttttcacttgattaccaatgcatgactgtgtgtgctcaaactgacacgctctatcaaaatggagattataggaatatgccattgctatctaaaaacattaagatgattaaaacaatatgctgagttctttgttaaaatctgttagcccttttttctggagaaataagaattttaaaaacctgtttgcccaaataatataaagaactctaaagaaatttagtaaaaacatgtatacttctcttaaatcaaaaatttataattgaaatagtagagcctaagtgcatttgtccactaaaacacaaacaaaaatccctaattactattttagaatagccattttagagtcaattctcctttatgtacatctctttaatgaccactgactatgttgcctaatttgacatgagcagcagattctaccacattaaggaaagtcgtatgctaaagctgtatggtctacaaaaattaaacaattttccgtaacatttggagtttcttaaaaactccaagtttctaaaattaggtttttttgtttttgtttttcagacagagtctcactctgctcactctgtcacccaggttggagtgcagtgcagctcactgcaatctccgcctccctggctcaggcgattttcccaccccagcctcccaagcagctgggaccacaggtgcatgccaccacacctggctaattttttttaatttttggtagagatggggctttgccgtgttgcccaggctggtctggaactcctgaactcaagtgatccacccacattggcgtcctaaaattatcattttaaatagaaagctaagaggcactagttagtaattttacacttttgcttagtctgccaaataagtgaaactgaggtctcattattttcatacaaccaagcattcactgtgatacttgttaatatttgaacaatggcatttaaaccataaaaataatcttgaaattttctaatttttctcatatcggaatcagaaaagggaaattatttcatagactcaaattaaagtactaccaatactatatttactgtattttaagtttcagaacatacatacaagcatatatacaagcagaacatctctaatccaaaaatctgaaatgcaaaatctgaaactttctgagcagtgacatgacagcacaagtggaaaacgttaccctggcctcatgtgacgggtcatagtcaaaatacaggagcagacagtttattcaatatccccaggaaaaataaaattaccttcaggctaagtaaataaggtgtatataaaagataaatgaatttaatttcagacttgggtctatcctcaagatagctcattatatatatgcaaatattctaaaatctgagaaattctgaaattcaaaacactctggtctcaagcattttgaataagagatagtcaacctgtatatgtaagtatgtatatgttttccctctgaggaaactgaaagagatttagcaacctgtgtgatttcagatagcaaatcagtgggaaaaaccgtatgagaacttaattaggtcgcgctgttcttggaccaaaatatagcttccactagattactctatatgacattccttctaagttcaaaccctaaaacaaagttctagctttacctgtgtacgaagacttaaaagacatattttgccagagttgatcacttgccgtacagaatctatgctagttccatacaaattcttctcaaattcaccatgctcaatgaactttccagctgctatgtctgcctcgaatgcttgccgcgaaacaaagtggtaatctctaccggctacttcttggtctcgcctactccgggttgtatctaggcaaacaaaatcagatagaaataacaggcatggcttagagtgaggacaggggataattctgctagtcagaaagaatttctattttgtaacacagattataaaataataaactgagaaaatgctaagtgcctacatgtttaacattgtttttattttttgtagattgaaaaatgaacaaaaatgagtttgtagtatcttagtaatagttatatttatctcaatacattttatgcttacacttcaagttacttcatcctgcatttaaaacactactactcatcttctcctaaagtttatctccataagattaggtaccatataatcttataacttctgtttcagattatgcctaagtttctatcttctgtatcactttaaagcagcaggaactgattctctatggaacaggaaattataaggggcccaaactgaaatttgtttagaaaatawtcagtacatactygaaggacaaatttaaatttcttaataatgactatttttaatttaaaaattgtcaaaatctttggttaaagttcctctttcactgacaacagtgttttaatgaaatgaataaaaaatttccctacatgatatagttaggttctgagctggtaaattgaaaagcacaggaaaatgggaatgcattcaaacttacgaggaactgcagatgcaaagcggtccttttctttgttcatgagcctctgacgcaattcattctggccacagttctgtggaccaatcaagatgataggtctcttcctatttgctggctgatgataaagtgacatttcctcataggttaagatctcctcgttgtcataatctttgggaaaaaaaagttaagcycttcaaacaaaattatggccatgtattaaagatataaatactcatagatcttcacccaaaattagacaaaagcacaatttattgtcattacatccttgctagggtatcatgaaaatgaatcagacaacaatataatactccttctattaatttttatctcatttcatatttgaaataaaaaattcatgcttgaatgtctaatacaatataattatactgattcttacattaaacagctaatttgcagtcaatactttgaataaggatgcggtaccagggaatgaactagtaagagtaatatccgtcatttttgaagaatgcagatattaatattctacttaagaaggttgttttaagaaycagacataatgtatacgctgaatacaatggctagcatagaccgacatttacatatagtggctacaaccagtgttatcagagaaagctggaatactttcctatagttcaagctcgtccaacccgtggcccatgagctgcatgcagcccaggacggctttgaatggggcccaatgcgaatttgtaaactttcttaaaacactgtgagattgttttgcaatttttttttttttttttttagctcatcagctatctctagtgttaagtgtattttacgtgtggccccagactattcttcttctaatgtggcccagggaaaccacaagattggatacccctgctgtagttgtataacttgaaaacaggccatatgcatgctatctccactttctgcatttatgtttactctactctggaatgctaacccagagtcatgaatcaaaatgaggtataaattatgacaggtggggtaacattcctaaagcccataatccagatgaaaccagagctgtcaagtggtaagaacaaaagcagataactagtagcctgccaagtcctcactcatattacttctcctgactgtgaaggagcatcagatgtgaagtcagactccctcagctctatttccatgaggttaggggaccatcttaggcttgtcaatgctcagcacagagcctggcacagagcaggagctcaaactacacttgtttaaattccagctcaaccaatcatgtattagttgttaagaatttcagcaaatcactttaatatctaaactttttttttttttttgagacggagtctcgctctgtcgcccaggctggagtgcagtggcgcgatctcggctcactgcaagctccgcctcccgggttcacgccattctcctgcctcagcctcccgaatagctgggactacaggcacccgccatcacgcctggctaattttttgtattttttagtagagatggagtttcaccatgttagccaggatggtctccatctcctgacctcgtgatccgcctgcctcggcctcccaaagtgctgggattacaggcatgacccaccgcgcccggcctaatatctaaacttgaatctattactctgtaacctcaaggagtttgtgagaacaacatcatatagttactgccctggaatacagcagttattatgaattgtagttatttatttaaaaatattcatgatgatgacatcatcataaacagcaaatgtaattccttctcctctcaaaatgattttmtctgaaaaatctgagtttattctaacacgtataatcaagactggtagcattttaatttatagactcagtgtgtatatccataaggttcagatttgccacgttttctacagtacagtagctcttagagctggactagttaacttcagtctgtttcaaaaaataaaagagatattaatcacaaatatagaggataaaatttaaaactcattaaatctttttagttacataatctgtcaattagcattaaaggatatttattttagaaaaaaatttattaaagttgatcaaacctcatttagcttttatggaatattataatgatctataatgttttatctttattagtttaatgtgtgctgctcccaaatatttcaaattcttgacagaaaagccttataaattacataagaaggaaagcctttgctttattatttgggttgcttctaatgtgaaccaaacagaagtagcaaactcaaatgcccataaaaacaaactaaggaggtaataaaatcagtaaatcaggttgggttaataaaacactgggagtggtagagactgttaaactagacaccaggtgcttgatataagagcaacagtcatcactcaggtccagcagactgytgtcacctaggaatactagcccaacattatcagagcttttgattttaagagaagctacaactttcgagctttttaatcttagcaatcaatcaaaataaaactaaaattctcttgtgtgtctgacttagccagcaggtagtgggttctcaggaatgagttgcttctgtgacatgagctattgtagaggacatagtttttacttcaagtatgttctgtaagaatttgttagaagtataatttttgcaaagagtttaagtagaaaaaaactacaggaaactgtcaatttaatactacatatgctaaatagtacttgaatttttgtatcagttttccccagaattcaaaacactgccttactcacaggattccaaaagaaaatactttctactaaatgattttctcaagcacatatttaacattaaggtgcaaaacaggactaggtttagactcctttcagatataattccacctatccctgagagtagaacttaccatcatttttattggcattatataaaacctttttcctcttctttttattcttctttgcacaccacagttttcctgttgagcaatcataaacataactataaatgtgttcccgtgaacaaaaccacrtaactcaaattgaagaactctatttattcattcatttattctttaaatttttttgcagaaacgagrtctccatatgttggccacgcttgtcttgaactcctggcctcaagtgatcctcccgcctcagtctcccaaagtgctgggattacaggtgcaaaccaccacacccagcttgtttttaatttacttttataaatacttattacactgtttgtataaagactatttttcaggaaagcatttacaattttcaattaactacacagtatagacagataatctttaatacttaaatcttatcctttctttacagttctgagataatcagttttgcctcttgtatcactctttccctgagtacttcttcacggttctaatatgcagattcacacatggctccagatgaagacccaagaaaccatttacttatgtcaaatacaagtgtctaacctgatttttctggctccttatcttcttctatggtttgtttcatggcttccctttgctgctgaaagcttttcccttaatagcagaaagaaaaagaagggtaaaatatttaagataaaaggataagaattttttttttaatcaagaagggaaaacactagacatatctcttcacttatattcccttccaaatccttttgccaacacaggagtaatgtcagctatgatgtgtaagcctccaaatttttaaaatattaactctgctcaatcaatcccatatgtattattagaatacatatcatctactaaaatatttaaaaatttaatagttcaactttttaaaaggtttcattgagcatttactttgtggaaaagtactatcctggatcttacaatggttctaggtcctttagaattatctcaaattaaggatatcaattctaggaattaacttttccaaaacaacatgtgcgcattcatcacatattcaattccatattcaattccaagaaaccattcagtatattcccttgcatgcattattctcaattcctcttcttttgtgtatgtatatgtgttagccattttttatttccacccttaagttaccaattatataaatggaaaacgtgcttttccttayaaaattaatattttaatataggaggctttcaaggttcctgaccttgaaagaggttttcttttccgacttctactttaaatcaaatatgtcttttcctataggatacaagtggcttcacttagaagattctgaattacgttgaggttccacttttttattttatttttaaatctactttttttcagtgtaaagccagagattcttaaaaatcaataagcaaattctacataggtggggataatctgtagaacttagtgcatttcgtaagtgtactaacaaaaagattaatactgacttccatacacataagaagcattaaaggaagcctggttatcttttgagacgaagtctcgctctgtcacccaggctggagtgcagtkgcgcaatcttggctcaccgcaacctccgccttccaggttcaagggattcgcatgcctcagcctcccgagcagctgggattacaggggcccgccaccatgcccagctaatggttgtwtttttagtagaggctcggtttcaccatgttggccaggctggtcttaaactcctaatctcaggtgatcctcctgcttggcctcccaaagtgccaggattaggggcatgagccactgtgcacggccaagactgtwttcttagtacaagtwactattactagaaggaaaattttaagagtattaaaatttaaaggggtcgggtgcagtggcttatgcctgtratcccaacactttgagaggccaaggtgggcagatcacgaggtcaggagatcaagaccatcctggctaacacggtgaaacccatctctactaaaaatacaaaacatcagctgggcgtggtggtgggcacctgtagtcccagctgctcagcagactgagagagaagaagggcatgagcccgggaggcggagcttgcagtgagctgagatcatgccactgcactccagcctgggagacagagcgagattttgtctcaaaaaaaaaaaaaaaaaaaaaaaaaattaaaaataagtaaccgatttttaaaaatcaagaacaaagtaattttaatcatttacatattaaaaatgtaaaacattacaatgatgtacttctgtggcactttttgtagtatgaactataggctattctgaaatagaggcagaaattaatgagagatggaaatgattttctttctttttctgagactgctctgttacactggtgtgatcaaagctcactgcagcctcaaccttccagcctcatgcaatccttccacctcagcctcctgaatagctgggactacaggtacgcaccaccatgcccagctaatttttaaattttttgtagagacaaagtctcattatgtcagctatgccactatgtggcccaggctagtctcaaactcctgggctcaagcaatcctcccacctcagcctcccaaagtgctgggattacaggtgtgagccaccagggccagcctcataatgacctcttaaaaaaatctgtctaattctgatggaaagccatcgtcaaactctaaggcagatctttagtcttataaaaagacttagaaatgtcatcattggaatctatatactttcagaaaatcaatctatcaacaaacactagttctaaacatttatgggctaaagttcggcatggtaggaagacaccatactgatatttggcacaagcctgaggcagaaccacaatggctacccaacactccaagattctagagaaatgtcctgtaactgttactctgaagaatcacgggttttagcatcatactctaaaataaatgtaagaagtccattcctccttccttaaaatatgactgatatagacaaaatctgtttctagcctctgagttttaaagtgagaaatttgaagctttctgtgaccttatactcaaaaagaataaatgtaaatattatgttgaaatctcttgtacccagaaaagtctctttggcttagttacagagataaaagagattccttataacttattctaaaatctttggacaacttcctctgttcctactatgtatctcatagtcaatatttctcagtcttttttttcatgccctccttttcttcttttcccctaaactattgcttgttgtcaaatccagtgtaaggctaagtctatagccaaatctgttatgcttaaaatcttctggtgtgagtaggagggatgatcgctaaaaaaggttgtagataaaagataaggccagaaaaacattacagcaaagcattgaaaggtctaattcagaaacagcagttctggcagaactattttttttttttttaatttttgtttgttttctgagaacttttaaaatcatcttttattcattaatttaacatatattatctggatttaaaacaaataagacttggcctctgacatcaagaagtttataaactgagcatatacagtagaaagaattataacagagacaatatcatgaaaatattataaagtaggggacacagaagaaaaaaatatacataagtgttaatggatatgctttcaagtaaagtatgtaagcgaagtttatctcagcaccaggcaaagtgctttacatggtgcagacataacagcatttattaacaaataaatggatgaattattatccctttactctatatccctatttttatcatcctgtatgtattcctttgccttctccgatagcttattaaacttcccttagttctgctctcctttctttattctactgccatcctgggaactgtaagagccatttgtagaaaataattatatctacatacagtcatgcactgcataacaacatttcagtcaacaaccaaccatatatatgatggtggttggaggaataggctataccacatagcctagctgtacagcaggctatatcatctaggtttgtgtaaatacactcagtgatgtttgcacaacaatgaaatcacctaatggcacatttctcagaacttatccctgtcgttaagtgatgcatgactgtactttgttctattttgtatcatcttaactctcagaaacatgtccccttaataatcttaatctataatgtaagctaaagttttagtttagtctaagttagggatagtttcatcaataaaaaatttggagcatcctrtttctgccctaagatcacgtttggtacaataaattctatgatgttacttttcctgactccttataaagttatgcatctttccttctcaaaaatcatgttgatgctccaattaatgtcatagtatatagtatayagtataatacaagttgtattgcctcgataatacggtcatcttaatatgtatacaggaaatgtactacaatatgggattggctgaagttatacataattccattctaaaggccaaagaattggccacattctatttaatatacttaygctgcaggtacaacataaaaacccaactacacgaaaaagtaactggaatactttattaaatagaggcatgaaaragtgagtttttctttgtgaaggcttgcattttcaatrttcttttaatattatgtactttctaccatattgtgtcttacctggaacaagcccggctagaggttgattatcttcgtccccttccctgtaggcctgccaccagtttggatcttcttgactgatcacatgaagtatatcacctttttgaaaagacagacctaactctcgacatggaacataagggtcatctgaggggtcatagtcaaaatgagcttttacatggatctaaaagataaaaagggcaaaaacaacaataaatggcaatataaaatgtttcatatgaatacaatttaaatgctacaaattttttattattttttaattttaaaaaaatttaatagagacagcatctcagtatgttgtccaggataatctcaaatttctagcctcaagcgatccttctccctcagcctcccaaagtggtgggattataggtgtgagccactgcacttggccacaatttttcatcagtgcaaagaaattgtagttggaagaagggtgttaagtaacagtgtttttgggcaatattttttcaggctgatctgttatcttctctgttgacttgcagatatgtacaaggatatccacaacactgttcgcagctacaagctgaggtacaaggtgcctcaaaagcttgagagaagcagaaatagaatagaatcctgacctgtgaaaacaatgactctgcaataaggtatgcaatttccaaaccacagctactagaaaaggtacactttaccttaccacatctcttcatctaagcaggtaaatatgagcttccctggggctgtcattgtctcttgaccccactgtcagtccaactatgccttaaactctcttggcgtttcttttaaaggatatgttcatgaaacaagcacactatcaacgactaaaattaactaaatcaagtttataatcaattcttatttgtatgctatgtaggctttgacatattattaacggtacaagttataatttttgctaataatgtgtttttggaaatcagaataaatcaaagaattgtgctattctacttagcattaagggcaggtagtaactctcatgaactttataagctattctgtatgccatttcttccaatatgcctctgtaagatatgacagactattcttacttctaagaagttataaaggaattaaaattctctttaatttccccatgtctaatttttacctaacctgggcaagttgcatgtgacacttccaaaatctataagaaatctacttcatctaatgagatctcacacaaatttgtaatgagcatttctgcccacatatttgcagtgagcatttctgtcacacataggttaaattccaagttcaggctcaacgaaccaagcaaaagacaaacagtctaagaattcaaggtccatttctatccaaatattatttggctttggcttttttttttttttttttttgagacggagtctcgctctgttgcccaggctggagttcagtggcacaatcttggctcactgcaaactccatctcccgggttcaagtgattctcctgtctgagcctcccgagtagctgggattacaggcactcaccacaacgcccagctaatttttgtatgtttagtagaaacaggatttcgccagttggccacactggtcttgaactcctgacctcaggtgatccacctgccttggcctcccaaagtgctgggattacagacacgagccaccacgcctggccttagctttaagtgttttactctcaccataattgaggttatatgtaataaaagtaataccagtctaccccaaaaggggcactttttaagcgctctttaagcacttgagacactgactaaaatgagtactgtcgatgacagactatatgaaattggaaaaaatgctaagtgacaaagatagacatagatagatagatagacagataaatggctttttaaaaaatttttggcttgtcattaaagaatattttttaatttcaaagaatattttattaacttctataaataggaaataaagctgagtcctaatatacaaactgaaactaaggttaaaaaatgatctggttaaaaatacaaagatataaaagttaaacagctaccagcaaaacttaaatgttattatgccttttgggagtaacttttgatacacaaaaaatacacattatcataagtgtatagcatagtgaattttcactaactaaacagacctgtataactagcatccaaatcaacaaccatcatatcaccaacacctcagaggccccacctggtctctttccatcactacccatcccatcccctccaaggataaacatcatcctgatttctagaaacactgattattttcccctgtatattaattcatatacatggaatagcatagtatataatcttgtaccaaatatagttaagataacacaccaaatttgaaagtgttgtggctcatcctaaatgcaaagtgccctaaagaacctcattctagatgtgaaaaaacagtttttattaaaatcttgaaatctttctcagtcagcactaaaaatgaattttagaaagttgtgtgggatagcagtgaatcaaaacacagttaagagattgagcaaaaagattatacaaatttataatcttggcatgaggaaaaatctcctatgtagttttatctagaaatatgttttctttaaaaaaaaaaaagtgcttgagcaccatcctatcaataatacttctagaatctgtttgttacttttttgccaaaaaaaaaaaaccttgagaatctaaaaatggaatttttggcatcacttgtagtggagagatcaattttaccagatttttcaaagatcaaatcaaagtacttgtcaatcttgattgacaattttatcaaatcactttctgaaagcctacccagtatgttgtttttcaaagtgtttttgctcagatcacctgcctaggatgtttattaaaatgatgaattctcatgccgcacctcagactctcagactctgaattttaatcaggttccttgggtaattattaggtacagcaatcttagggaactactaccctgagagaaattaagacccgtgaggagggaatatctacatttatgaccattgccataggccaacaaaatcacccagagatgcttttccatgtactcttgcctatgcagttctcatcccttaactattctaatttaactggcttggaacagggcccctctttgtgtaggctgggaagagaacatgctttacttatgtgacaagtttctctagtcccatctaaaatataccctaaaattaagagaaaaagctcttactttcctaaaattaagaggaaaaggctcttattaatttttcctaaggaaaatttatttcacatctgaaaaattaatgatttgaatgagttaaagtctgggtattgccttaacagatactatatgacttttatccatatattccactgattaattcttaccagttctagaagttatctccaccaatctttcctgctagtgtcaaaattattttgtttctcatacaacaaaaaaagcccctttaaaatgaaggagataagctgaccctcataggaaaggtccagggcctcataatgctataataatatcagaacagtatatctgatcaaaacagtatttggcttctgaacaaaacaaaatcttctgtttacatttcaaattgtagaactgtttggacgcaattatcttccagcccaacattttctttttcctttttttaatatctataagctgttcacatttgaagtcgtaatgatgaaatggggatagggtacagggataatgattcatcagtttatttacatgttttttagggatccaatgttccaaaatattgtttttcaaccaatcaagaaggctattagaattacttattaataaaacttgtcctatattgtaatttgggatagtaagtagagtagtacatatatatacaatatgggaggggacatgttcaatgttttttaattgataaaggtataaaacaaaattagctggtggcacagtagatggtacttgtacacggtacagggtagctgtaatcccagctacttgggaggctgaggcgggagaatcacttgaacccaggaggcggaggttgcagtgagccaagatggcaccattgcactccagcctggacaacagagtgaaactctgtctccaaaaaaaaaaaaaaaagaaaaagaaaaaaatatttggagagtgctgatctaaaactcaggatctatattccacttgctcaatggacactcctttggaaaagtataaatttgccacaaccacctggacagtgtacttgggagacaactttgggattagcttaatggaaaggttagtactcatgaaggtaaggctatcacattggtgacgccctcaaaatcaaagagaaaaaaaagaaaaaaaaaaaaaaggaagtttggtttttcccttttctattgtctaagtattaggttggcttttatactttttacactgactttttttttttttaaactgttaagttcagggatccaactgcaggtttgttacataggtaaacttgtgtgttgggggtttgttgtacagattatttcatcacccaggtattaagcctagtacccattagttacttttcctgatcctctccctccccctgccctctaccctctgaaagaccctagtgtgtgttgttcccctttatgtgtccacgtgttctcatcatttagctcccacatgtaagagaacatgtggtttttggttttctgttcctgtgttagtttgctaaggacaatggcctccaactccatccatgtccctgcaaaggatatgatctcatttttttatggctgcattcgtattccatggtgtatatataccacattttctttatcgaatctatcatcgatgggcatttaggttgattccacatctctgctaccaaaatatttttctttgtaatttttatttctgtatctcttactatcgcagatttatctttaactcttaaagttcattgtagaagagaaaatagtgaaagtgagtcaaggaaagcctttatagcaccaagcaagtttttaagtatctccacacaacactagaatttctcctttccccacatccaccaagaaataaatgtctttattaatacatttttatacctataatgggaaagcaatgtatttgatagcagtggttctcaacttttctttacaacacagttatctctgtagtgcctggcacagagtacataatcataataatagcttatatgtattaaacaatcaataatctgttaattttctggtacatattctgtaactaataagcgatgtgatccttcttcatttaaatacactccttgttagattatggcattagactaaatgaaaaagtcccattcagataaaagtctattatgccctccctacatattattatagtatagaataatctaaagttttacaaactagtctgggaaatccaatccttcctttttttaaaaaggccgagagaaggaaactgtacgtttgaataatgtatgcatttcctagatcaaatgtgccagttactcaggaagtgaaatacagaggtgccaagactcttgccctctgctactgaaagagcagccactgattgctatgtgtgatacaaaagaaatttaagaactcaagagagcacttctgacacagcttattattgccatacatgacatcataattcaacaagtcattatataggggtttcagataacacttattttgtatatctgtcttaaacacatttctaacatcacaaaacataaatcaggaagatatctgctgctgctgctatcaacagatgctgacctgtaccataatgatactcaataaattggttctaatttctttagattattaattccatagataattattctgcatatgtcaaccaagattatgatttcctattactgtttcctttctggacagcctcaatgagctttaataatagcagttcattttaagccagttaggtctgacaaaacttggcaagatatattgcaattgagagttattcataataaaaagagaaaagaaggggctgggcatggtggctcatgcctgtaatcccagcacttgggaggccaaggtgggcggatcatcagaggtcaggagttcaagaccagcctggccaacatggtgaaactctgtctctactaaaaatacacaaacacacacacacacacacacacaaattcagccaggcatggtggcgggcgcctgtaatcccagctacttgggaggctgagtcaggagaatgcttgaacacaggaggcagaggttacagtgagccaagatcgcaccactgtactccagcctgggcgacagagcaagactctgtctcaaaaaaaacaaaaaacaaaagagaaaagaaggaaaagaaaaatactgcacatcactctattctgaaaagatccctactttaaatatgaaaataggccgggttcggtggctcatgcctgtaatcccagcactttgggaggccaaggcgggcagatcacctgaggtcaggagttcgagaccagcatggccaacatagtgaaaccccatctctgctaaaaatacaaaaattagctggatgtggtggcatgc

SEQ ID NO: 95000 - DNA, 106763 bp, Homo sapiens
aggtaattttatagcccttttcaagcagaacaaacttcgtctcctctttcttaacatttgggcttgatctttccttcattataaatttttccaagccctaaattacctacatcctctctcggaaataaaatttctcagggccaggcgcggtggctcacgcttgtaatcccagcactttgggaggccgaggcgggcggatcacgaggtcaggaaatcgagaccatcctggctaacacggtgaaaccctgtctctactaaaaatacaaaaaattaaccaggcttggtggcaggcacctgtagtcccagctactcaggaggctgaggcagcagaatggcgtgaacccacgaggcagagctcgcagtgagtcgagatcgcgccactgcactgcagcctgggtgacagagtgagactccatctcaaaaaaaaaaaaattctcatagaccctattttatttcttgacacatctccagactggcataggaccactcagatgggtacaaataaaagaatgataaatgattgacattctaaatattgaatatcctaccctgaggcttttgttgactcttgtttccatattaagctcatgcttcttttctctgtttatatcactcagtcattcacatttagaaaaagttttatgtgtgtctttttaaaatttttaaattaaattgataaaaattagatatatttatgacatacaacatagtattctgaaatatgtttacattgtggaatggctaaatcaagctaattaacattacctcgcataccatttgttttgtggtgagaacatttaaaatctagtctcttaagtatactaaagtatactatacattgttattaactatatactcaccatgttgtacaaatagagctcttgaacttattcctcctaactgaaattttgtatcctttgaccaacatctccccactcctccctccaactcatgtctatttttttaaagccatgtataagatcctgattttcctattattgtgagtactttcagagcagtttattcactgttcccacccgcaccttcactagatagtaaagctcctcctggtataagaccttttctttctttgagtctagcacacttatgttcattcaccatgcttttccttgtattttatttgtcttatcgtgtcctttttcctacctttcctgttcctctaggataaggactgtcacacagatttcagtgcctatagcacaatgcttagcccattaaatgagtgaatagttgttaaagccaattaggttgaataatactaacctgtactgaattacactggtgcagatagtgggaccttccattccatatgacaactgtataatgttcttagctcagggatatactatatttagctagatttatgaaagtttaaatcctcctataaaacatctaaataagaataacccaattaaattagaaaagttcattgtttgttggtttgctttttgttattttattattttattttattttattttagatatttggccagacacggtggctcatgcctgtaatcccagcactttgggaggccgaggtgggcaaatcattttaggtcaggggttcgagaacagcctggccaacatggtgaaaccctgtctctactaaaaattcaaaaaaaattagccgggcatggtggcaggtgcctgtaatcccagctactgggaggctgaggcaggaaaaccgcttgaacccgggaggcggaggttgcagtgagccaagatcacaccactgtactccagcctgggtgactgagcaagactccatctcaaaaaacgaaaatatattatatatatatatttatttactagaactactattcgtaggtaatttttgtttcataatttctcttttatctgagttactgagtattctgcttttattatacattatctctgatcatctggttcatacaattatgtgattaggctactaattcacttatgaaaattctaagtactaattcactgaggtactagtgaaagccaagttatgaaaaccatactagtgaagacctggttttcactagtacaaagaggacatataatagccttagttaaggctacataatttgatatataatagggaataataaatcttgaaaacaaaaatttcagaactttttacaagtggctgaaatgcaacatgaatatgtttcctccaaaactttttttttttaatttttagagaagggggtcttgctgtgttgcccaggttggacttgaattcctaggctcaaacaatcctcccatcttagccccctgattagatgacaggcacatgccaccatgactggcttcccaaaacttttaatgaaataaaatagtgtggtattttattacataaacatttaataagggatattgacagacaatgggctaagcagatgacaagatgaggaagaagggagggtatttactatggtgactgtccaccttactcctggttttacagttaggctttcactactcatccataatatttagttacaaatttgttagagtgactcagcaggtgaactgctttctgacgaggatgaacagcccttctgacaggggggtttaaaccacagattgtccatttcattctattttggggggaatattatattctcttaacctcctatgctatccatgttagactctatatgcagaggctaccaaatcctaaaactagggggaaaaaagtagttaacccctttacattatagatgagaaaatttaggtccaggaagcttgtcacacatctaaatcacagaactagctagcagcaaagctaaaacttaatctaattaccatgcctccagtttctatacctttcactctttcagctacccttcagtttttgcatatataccagtaatttgtatgacttggagattctgggattggctcaattcaccagaaaatagatttcttttttcttttctttctttctctttcttgctttcttttttttttttttttttagacacggtcttgctctgttgctcaggctagagtgcagtgacacaatcacagctcactgcagcctagatctcctgggctcaagggatcctcccatctcagcttcccaagtagccaggactacaggagcgtgccaccacacccagctaattgttaaatttttttgtagagacggggtctccccatgttgaccaggctggttttgaattcttgggctcaagcaatcctcccgctttggcatcccaaagtgttgggatcacaggtgtgagttactgcacctgacccactagagagtagatttgttatttgctgtaggatctgccctcttttaacatgaaaatatctttaggaggtaaaataataactttttttttttgagacagggtctcactctattgcccaggctggagtgcagtggtgtgatctcagcttactgcagcatcgacctcccaggcttagatgatcctcctgcctcagcctcccaagtagctgggattataagcacacaccatcatgcccagctaattttgtattttttgtagagatgggtttttgccatgttgccaaggctggttttgaactcctggggtcaagggatccatacaccttggcatcccaaagtgctgggattacaggtgtaagccaccatgccaggccataactaatatttttatagcacttcttttcctgaaaaaaatgcccttctgaattgttatagcactttaaaaaggaatttcacatattttgagataagcagctggtctgctatctcacactcatactaataattattttattatggtggggtcctgtatgggaatctaagcagctgaggaagcaaggctaggtacttggcgggttcatttgggtggaggctttttttgtgtgtgtgttttgttgttttgtaaaactgcctggggccaagagattggaagttacggataaagatatactatctttccaaagaggtcctttctttgaacagctagatctgcagtccttacctgaagatgattttgctcattcctccccatgacctttggtgatgtctggagacatttttgattgtcacattggggagggtgatgctactggcacgtagtgggtagaggctggggatgcttctaaacatcctatgatgcacaggacagtccccacaagaattatccagcccaaatgtcaatagtgccaaggatgagaaattataagctagagaaagaagaattcattgacgagctggaggaagcttcttgaattattatttatgttatatatttaagaacttagaggcggggcacggttgctcacgcctgtaatcctagcactttggaaggctgagaaaggtggatcacctgaggtcaggtgttcaagaccagcttggccaatgtggcgaaaccccgtctctactaacaatacaaaaattagccgggcgtggtggctggcacctgtaatcccagatactggggaggctgagggaggagtatcgcttgaacccggggagcggaggttgcagtgagccgagattgcgccactttactccagcctgggcaaaagagcgaaactccgtctcaaacaaaaacaaaaacaaaagaacttagaaaaggaagtaagtcacacacagtaaccgttttttcttttggggtatggctagtagtttctaggaatcctggagactttatctggatttcagttaggcatttcaccagttctcatggcatctttatggaggaatatgggccaagaagacagttcggttgtgtcgtccacctgtattcgaagcctactgagaaatttttgatggcaggagcattaaggtctttagtggcatgcagcagagttctgtcctccgctctgtcttattaaacacttggacagaatgctgatcagatttgagaaggataacaaatctgggaagggtaggcatccccaaagatcttcaccaccaggaacaacggtttgcttcgttcaggccatcacagtgtccttagtgagggacaccacaacccataggctgtccagaggagcgtaatggggaagaatgtgaaagagcttgaaaatcaggacctgaggacattgcgagatggaaaaacaccgtgggacaaaatgaggaaaaccgagagaaatggaaatggcatatacgaaggctttgagggaggactgtgcccctgggggaaactgtgcccccgggctggagtcacaggcatagtttggcctcatagaaggagaggtcgattaacaaaccttgcaagtgttcaaatgtggaatgggcttgctcggaaggtactgtcaagacagagaccatccgagggcttttattgcaagtgtcgagacacattgctggtgtttctccttagaacgtcctccaatctgctctgacttccgcccgcacccgcctgagtcctgccccattccaagggtggcacatccaggtcccgagggcgccagccatgcccggagcacgggctgatctgcgtaactctgtcccttcgggagacttctgggaaatagttctagtccttgctatccttgctttctggttttcagaaatcagtgcagctgctggctttatgcagtcttctgcgggacactgcacacatccaggtgtttatgtcattttttaaaaaaaacaaatgttagattgggtgactaacttgacaggacatgaggaatctcttcaagaggaatcagattttcttcaggatacgtcatccagagacaagagccaagggatgtagaaacccagggaagcctcgcgtccccacaaagcccgccggccaaatcccgaaggggctctaccgggccagctagcccggagcagtccgcgttttagacttagaggcgcgcgactgcgcgcacccggctggagctgcggagaggaccaatgagcgggcgctctctccgctccggctcgggattgggcaagccgcgccagcctctcacgggcggggtgggactcggatccgcgcgcccactgcgccagagtcccgggggcgcgtgcgcggtctcgcggcggccgcaggggccggtctcgcgcggtctagaagtggagttgctggcggctgcggcggtgacggcggcgacggaggaggcaggcggtggggcgggggcggggactaaggattctgaggtggggagtcgggagtttctggattctttatccggaatttcaagggccgccggagggctgtcgcttctgcagtgcgtaggagcggccggggcgggaggctccgcggagccgaggcgtggaggtaagaggcggatcggcggcggctgggctgtagagatcttaatcaacaggtccctgggagcgcggcgggggaggggcgggcggccgggctccccttcccccacacgctgcgcaaactccggccagcgggagacccctggcagccaggcgggcttcctcaggcgcgcgagctgcggccgtggagggtgtgagcccaacctttgtccctcggagcaacgctgcctgcgcggtgcccgctccttctgcttggctgggcatgcaccttggcgcgggccacagccagccgagcccgaggtgcagggggcgcggcggggagtcgtctgccccctgcgccctctctccgaggtcgcgacgcgcgggactctcccggccgggtctgggaaatcggcgagggaacgctttcctttagaagtcagaatgtagtcagcgttcctctgcctgactcagctgctggtattctgctgctcattgcgttcttaaacacgcaaacagttcctgcttccttgtgaccactttaaaagaaaagcctagttttgttcatggtttctgatactttaaggttgcacgttgaactttgaagcatgtaaattgttataacctacgtttaatgaagtttgctttaaacgatctttgtagtaaattatgtaactttctaatgatcataactcaccttctgttgattgacatacagtaatgtgtacggaatgtaggtttcggtcaaaaggtttttcttggcagtttatgctaaaattaaaatctgatggctaggaagtttttagatgtagtatggagtgtgtgttttgtctccatactcgtttagaatagtaagaatttagatttggaaagtcagttgaacaaaaattttgaaattttgatttgactgacgcagtgaaaggtgttaatatttctgattttttaaaaaagcaatatcatgttttaatgatagtttactaattatgcttttggattataccagaagttaataacctgttaaattatgcaataggaacaaatgacgtgttggttattggtgtctttgaagtattggtggtaatgaaacttattaaataagcttccttgaattaagaactacgattttttttttttactagatccctgtggacatagctattgtggataggttttataggctttctatttgcggcaggatgagctattaaattataatgtaagagatttatagataaaacaggcaaaaataggaaaagcaattcattattttatctttaaaaatctggtaaattttaccatgtacctgaattagttttggcaagacggacttgaacttgacaaattaaggtggattgattaacattaatttgttttagaatgttaaaacgggagagaatatataagttctacttgagggtgacccaagtcagtacagtgggtttagcttttacatgatcttgaattatgattttgattaaaaatctcatcacaggggcacgtgttttcaggatctcctgagggctgtgtcatggaaaaaataaaatttatcacccattccaagaaatttgatcaattttatatattatttactgaaatgccctatttctctgatattttctgatttcagagtgtctagaaaaaaatagtatcttgacatatgtgcttatatagaatataattgtcttttctttttttttttgtgagacatagtctcgctcttgcccaggctggagtgtagtggcgcgatcttggctcactgcagtctccacctccctggttcaagtgattctcctgctctcagcctcccgactagctgggactacaggtgctcgccaccacacctggctaatttttgtatttttagtagagacggggtttcaccatgttggccaggctggcctcgaactcctgacctcaggtgatccacccgcctcggcctcctgaaatgctgggattacaggcgtgagccaccgccagaatataatttttttttttttttttttttgagacggagtctcgcgctgtcgcccaggctggagtgcagtggcgcaatctcggctcactgcaagctctgcctcccgggttcacgccatttttctgcctcagcctcccgagtagttgggactacaggtgcccgccaccacgcctgctaattttttgtattttttttttagtagagacgggttttcaccgtgttagccaggatgatctcaatctcctgacctcgtgatccgcccgcctcgccctcccaaagtgctgggattacaggcgtgagccaccgcgcccagcccttatgatttttgatcatatacttactgaatcataggatcgttgagttggaagtaatcttagtggttatatagtctaacctcttcattttccaygaaaaagaaagtgaggcttgcaggagttaagtaatccgtagtctgactgctagttaggggcagacttggaactacatgaatgctaaaatgctgttctccatattctaagtctccatattctaaattcagtgctcttctcaggatgtctcattgttagataaaccaataagttgccttttccaaatcacttaactggcaggattctttctgtcatggattttttccgttttcttttttaataactactaactgcaattcattcccctactgaagaattttcagttttttaatatttcaaacaatgtttaatgaatatctttgtgtatgtctccttgagcgcatgtgtggacgctttcctagaatgtatgtatacctacctataagtggaattgctgataataggttgatatgtgttttcaacattactagctacagccaaattaccctttttaatgctgtaatcatttacattcctgcaaacagtatgagtgacagtggcttcacattcttgcccacactgggcatcgtaagattttaaaatttttgctaatctggtggatgagaaatgatataattgcttcttttctttaaaaaatatttaactctaatttacatgaaatgaagttaacttttcattgtacaattccaactcagagagctgtgcaactaccacaatcaaggtaaagaacagttccatcacctatccattcaccagttgaaggacatttgagttgttttcaggttttttgtgactgaataaagtggctgtaaatctttgcaaataggtttttgtgtaaacctaagtttttgtttctcttaagtagatggaatatggtaggtatagcctaattttatcttaaaattaaaaaaagacctatctgtggtagacagaataaaggtcttcaaagatatcctaatccctggaacctgtgaatatgtttgcttaagtggcaaaggcttatttaggttgctaatcagatgactttagggagattattgtggattattcaggtggtcccagtgtatcacagaatctttaaaaaaggaaagagagaggcagaagagtagagtcaggaaaaaaagatgtaacaattggtcagagaagtgcaaagttgctggctttgaagatggaggagagcaggccacaaactaaggaatatgagtggtgtctagaatcttgaagaggctccagaaaagaaagcagccctgccagtaattttagccaagggagacatatgccagatttctaacctataggactgtaaaataatttctgttgttttaagccactaaatttgtggcaatttgttacattggcataggaaactaatacattgtcaggctgggtttgaagtggctgaaccactttgcatttccaccagcaatatatgagaggtcagttgctttacattcctgtcagcacttggtatggtcagtctttagatttagccattttartagtatctcgttgggatttttctttgcatttcccccatgactgaggatgttgagcatcttttcatgtgcttatttgccatctgtttatctttggtaaagtgtctgaaacttttgcccatttttaaattggattattgtcttattgctgaatttattattatcttattattttttccttttttctttagggatggggtctcactatgtttcccaggctggtctcagaactcctgggctcaagtgattctcctgcctcagcctcccaaagtggtgggataacacgcatgagccgctgccccaaaagttttatatagtcctttatctttgtcagataagtgatttacgaaggttttcttccactctggcttgccttttcatcctcataacttctatacttcattacttttgaagtatagaattttatattttgagaaagtccaaattattaatttttaaaatttgaatattgtatctaagaactctttgctcaatccacggtcagagagatttttctccaatttttttttccaagttttatattgtaattttatttttagatctatgttccattttgagtttatttttgtataaaatgagagaagtacaagttgtttcacttrtttgtttgtccagttccatgaccatttgtttaaaacatgatctttttcccattgtattcctcttgtctctttgtcaaaagctatttgactgcatttgtttgggtttgtttatggactcttcaattgatctattttgtctatcctttttattttttatttttattttattgtatttatatttttattttttatttagagacagggtctctctctgtccaggctggagtgcagtggtgtgatctctgctcactgcagccttggcctcccaggttcaagcaatcctcccaagtagctgggaccacaggcgtgccacygcacttggctgatttttaaatttatttgtagagataaggtcttggctatgttgcccagrctgtattatttaaaaattttttgagacagggtctcactctgtcacccaggctggagtacagtggtgtgaatatggctcactgcagcctcaacctccaggactcaagccatcctcccactttccccagtggctggtactataggtacatgccaccatgccaggccratttttaaaattttttgtagagacaagatctccctatattgcccaagctggtcttgagcagctgagcacaagggatccttccacctcaacctccaaaagtgctaggattacaggtgttagccactgagcctggcctactataggtttttttttttttttttttttgagatggagtcttgctctctcgccaggctggagtgcagtggcacgatatcagctcactgcaacttcccgcctcctgggttcaagtgattctcctgcctcagcctcccaagtagctgggattataagcgcgcaccaccacgcccagctaatttttgtatttttagtagaggcggggtttcaccgtgttggccaggatggtcttgatctcctgacctcgtgatctgcctgccccggcttcccaaagtgctgggattacaggcgtgagccactgcacccagcctactatagctttaaaataagtcttcacattaggtaatgtgactcttccactgtrttctttttcaaaattgttatgactatttttagttcctttgctttctgtrtgatrtttagaatcatcttgataatttatacattctgttgggattttgattgagattgtgtctaatttagagatcaacctgaagataattgacatcttaataatttgagtcttctcatctatgaacatgctatttctttccatttatgtgagtattgtagttttcaatatgcagatcttgcaaatactttattaagtctatacctaattattttaattttttggtcctattgtaaatggtaatctaaaaaaatcagattccagttgatcactgatggtatatagaaattaatttttgtatattgactttgtatcctgactttctgctaaactcccttattagctctaggagcttttttattttagtaattttttttggaattttctaagtagacagtcgtgctcaaaacttttctttccttctagtctgtatgccttttatttcttttccttaacttgctgtattgtcttggttaggacttccactgagatgtcgaataggagagatgagaagtagcatctttatcttgttcactttttttttttaagatagggtctcactctatccccaggctaaagtgtagtggcgcagcactgctcacggcagcctcgactttctgggctcagttgattctcccatctcagcctcttgagtagctgggacctactgcaagtgccactatgcccagctaattttttgtatttttagtagagacagggcttcaccatgttgcccaggctggtctcraattcctgggctcaagcgatctgcccacctcagcctcccaaagtgctgggattacaggcatgagtcacagtgcctggcttcttgctcactttcttaaaggaaaagtattcagtctttcacttttaaaaaatgatattagctgtaggtcattttgtgcattctgttaaggaggttaaggaggttttcttctgttcctaggttactgagggtttgttttttaaatcatgaatagatgttgaattttatcatatgccttttctgcatgtattgagatgattgtgtgaacttttttctttaatctgttaatatggtgaattacactgatttttcaaatgttgaaccatatttgcatgtttctgggactaactctggggttattttaaacaaaaatcattttggatttttaaaaactaatatacattaacatttattcttaaaaatgaaggagcaatgtcacatgcctgtagccccagccaattgggaggctgaggtgggagggtcgcttgagcccaggagtttgagtccagctgagcaacataacaagatctcttttcttaaaaaaaaaaggaaaccaaatataagattttgtgaactaaaatacttaatgaagtcagtagagtcaaggtattcattaacagttacctacctacattttacattttagtaggacttaaattttcttgattatgatataacattataaaaattaaaacatttggctttctgtctcatataattttatagtttcttcttcagttaatagtctcaaacaccctcaaagacgttgaaattttgaggcctccagggttcttggcattttgcttctttaaggcaggggtcaacaactttcggtaagtattttagcttcgtgggccatattgtctctgttgcaagtactcagttctgttgttagagtggcagaggtagccaaacaaatgagcatgacttttccaataaaactttacttataaaaataaggtgtgcctgatttgacctctggacttagtttacataccaacatttttattttatttttttgagatagagatggggtctcactgtgttgctcaggctggtctcgaactccatgacccaagtgatcctcccaagttggcctcctaaagtgctgggattacaggcatgagccaccacgcctggcctacataccaatttttttttttgagaccaagtctcactctgtcccccaggctggagtgcaatggcatgatctcagctcactgcaacctctgcctcccgggttcaagttattttccctcctcagcctcccgagtagctgggattacaggcacccgccatcatgcctggctaatttttgtatttttgtggagatggggcttcaccatattggccaggctggtcttgaactcctgacctcaggtgatttgcacgtctcggcctcccaaagtgctgggattacaggcgtgggccaccatgcttggcctcataccaatgktttaaggcaaaaaatcagcaggagaaatgacagtaattgtagtaatgtagtaaaaggaagcttggggtatttatttcatgctgtaattctaggccaagcctcacttttctcacctatgacatgtagccaccttgaaagatgattgaaaaattcaagctgagatatggaaagcacctagcaaaatatctgacacatagcagatacttaataaatattcacttattcactttttgtttcaagactgcacagtgctttgtcacaaaccaacagatgtgaaataattaaggagagtcaggtttttacagtttgtagtatatctaataagttcaaatattagaaattttaattatgtgtctatagttatcttttgagttatgcttttttgatataaatcataattggcttcacaatttgagaaacttcacacaaaaagttgaggattttgtgtgaaaacattatattttgagagttttacattgtcacagaaaaggtttgagaatgtaacttaaaatacattattttgttttgatgtaagaagtaggcaatctgtattttgcttgtgtgttttagaagtgcctttaagactgcattcgtttaacgtgattgcttcctatgaatgtagtgagctaggtgctctgctaggacttggttgtacttagagtatccatatttagatactcatttttgtgttatgtttgaaatgtaagtaacgcttcggaaagtctttttttctgagtttctatcaagataaagctgttctattttgttttttatgaagctggttgagattcactagagcgattttatggcacacaaatgggtcacatcctacaacttgaaaaccattgatgtagatagacgaaagtaacccttctccaagaggctgtgttcataatttcatttaaaattcagccacccactcttccttcctccaggaacgttccataccctcctactggcaataagttttagttcttaaaattttagtaaagtatgcattaacaatttattcttttttgtaactcatctgtaaattatcgagagctgtgactactgtttgatgttcatttatgctcagaagtactagacactcaaatatttactgaccaaaaaaatctggaagaaaataagttatgtgttaaacagtggttcttctgtcttagtattggaaatcacattgcctcacattgaaaactgtataaactccagtttatgtgtactggacatgcagatttaactgtctaatattaaacaaaaaattctagttaaacagattgttttgtgattctgatagtcatctgggcccttcctctgaaacacacacactgttcatacaatatgcagggattcatggaaataaagtcatgaaccccagatacaggtctctgatccaggtgattcatcgactgtataaatgacctgcaaatgtttttcacaataatgatttgcataagggtaatcagtacayacttagagttaacgaaaataaatttcatagtttttgtaggcatcctaaaggaatcttatccttctgttttttayaccttatccttttayacttaaaatttatagcaagattgatagttcatttgaccaaatcacaatactttctgctttcccctcttatccagaattgtatccctcgctgtgtctcttaatgtgttatgctgtatgctgtatcctttgtatgtatttcttaaatattaacaactacatttcaagttctttgtcagcattcttctttttacaaatgaggaaattgaggctcagagagattaaatattttttccatagtcctattataagtgatagaaaggagttgaattaattttatttgatcccaaagcccttggcttttctgctttgtctgtaatatagcctgccttaagacttattttaacattgtctttttggtaagattagaaactttttgatgaaagccattttccactttacctagtgtttaaaaatgtacgtgaggctggcgcagtggctcatgcctgaaatcccagtattttggaggccgaggcaggaggaccgcttgagcccaggagtttgagaccaacctgggcaacacagtgggaccctgtctctacaaaaaatacgaaaattagctggacttggtggtgtgtgcctgtggtcccagctactcaggaggctaaagtgagaggatttcttgagtgtgggaggttgaggctgcagtgaaccatgatggcaccattgcacttcagcctggtcaacagcaacagaacgagaacctgtctcaaaaaaaaagtagttgaattaaagtgaagaactttgagcctgtaaattgtaaataagctccttaagggtaggatagtgggttgtatctttttgtcttagtatgtcagcccttaatatggctgtgatacaataagaaatatatatttggtctttgtccctgacagctgacctagagcttctaaatcccttggaattttcttaagcatagagagtcttttgtttgaatgagggtgataagagcatcttttgtttcagtgagtcaactcttggcaggcccctataatagcttcaggttaggggctggttgccagaaagaccaaggcatggggccccaccttcaacctctgggaaggcaaagaggggctagagatagccagtcaccaatggccagtaatttaatcatgcccatctaatgaaactcctaaatgacagtgtttggagagattctgggttggcgaatatttcaaggtgctgggaggctggtttgactggagaaggcatggaagctccacaccacccgcctaaaccttgctctttgcatctcttccatttggctattcctgagttgtatcccttataataaaccagtaatagtaagtaaagtgcctttctgagttctggggccattcaagcaaattatttttatttatttattttttgtttttcttagaatcaaggtcttgctctgtcacccaggctggagtgcagtggcatgatcatagctcactgcagccttcaactcctgggctcaaataggcgtgcaccaccatacctagctaattttatttttattttttgtagagatgaggtcttgctgagctgcccaggctggtcttaaactcctggtctccagcagtcctccagccttggcctcccaaagtgctggtattacaggagtgagccaccgtgctcagcatttagcaaactattgaacctgaggagtggtcatgggaacccctgatgaatagctgggtggtgtgaagtacaggaggcccaaaacttgtggctggcatctgaagtctggggcagtcttttgggactgagccattagcttgtgggatctgattgtaactccaggtagatagtgtcagaatgaaattgaattgtaggacacccagtcggtgtccagagaattggtgtgaggaaaagacccacacatttgatgtcatcagtgttgagaatgaaaaaaagctcggaatggcacatagtagatgcttggtttcaatttgtacttttatcatttatttgtttaaactttagccttgctgtgagctaaatattagagactgttctgttctagtcatctcccataaacagataatttgacatttgaaacacaatttcatttattctaggttggccataaatgtgtttactgggaggaaatctaacactttcacatgttcttgattagctttttctacaaagacataaccataaatgtattaatttgctgatgactttttcttgtttttccataggcacatactgacaggctttacagtgcagttacagtactatcactgacttacagtacttttacagattatagagtcagatgtctgcagaaatactctcttgacttgtgtgtgacaatgaacaggttaacttatcaaagcctgattccttatctgcagaatggggatgcttaattcagtaggttttattttgaggattgagatggtacatcaagaatggtaggcatggtgttagtatatacatattaagcactctttcaatgttagataagagataggagttgtgtgacttggttgttatagtctgaggtaatgatgaataattataattgtatgttgaggtcagctttctaatctctgaaataatagtgaaagtcaaatgagagaaaacaatttgttgtcctaaacagtttacttatatagtgagattaagttctgttcagctttatcagcttctctatttgactcaagaattactctggggtgtttttcagtaggttgttttcactacacatttttaaatagactttaaaaatgacgtagttaggccaggcgcagcagcttatgcctgtaatcccagcactttgggagactgaggcaagaggactgcttgagcccaggagttccagacccgcctagacaacatagtgggaccctgtacctacaaaaaatacaaaaaaattagctgggtttgcattcctgtagtcccagctacttgggaggctcaggtgggaggattacctaagcccagaaagtcaaggctgtggtgagccatgtttgtgctgctgctcttcagtctgggcaacagtgagaccctgtctcaaaaagaaaaaaaaaaaaagacatcatttccagagttcagtttcattatggtgattcaaaatcttaggcttggatagagcatttgtttactgatatcagtgtgtttgtgttaatattttgttttgtttttttttttccattttgagtaatggatgtctttcatgtcttttttgggccttatattcatccccccccccttacaagttttcttaggatgctcttcttctacaagtaactcctgtgacattttctacagttctagtgtggcatttaccaaatagcactgtattggttttttatttgtttacttatctgatatctatactagattttaagtgyctttctttttttttttttttttttagattttaagtttcttaaggatacggactctgcctcagcagcctttttcttgacaatgactatccaagtttttggtaccaagtgggtactcgccttgttgaatgaaaaggtagttttagcttaaccctttttcctattagatttgcagtatagttatcttatagattgaccttttattcttatttcttgtttataagaatatcctcatatgctttcctcccctgtaagactgtcttgtcaaaatcagagcattactcataccctcagtcagcagtactaccataataaaagttaattgtactctaaacctgttgacatttgtattctcattagccttcctttcttatcagatttttcttttttccttttctactgatacagtcgtacttgtcctgaaatactctctactgtcactgcttcagtttaatttatagatagcaccagatatgagtccttattagttctgataactctgaaatggttatttggtatttcttcagtgacaagcaaactatccccccacctgcctttaatggccagtgtttttgatttgcataccaataagcgatctaggtagaggtaatcatctactaatttgctaacctttggaacataattttttctctagtaagctgtaaatcacttgaagttagaagttggaatctctggccgggcgcagtggctcacacctgtaatcccagcactttgggaggccaaggcgggcagatcacgaggtcaagagattgagaccatcctagccaacatggtgaaacctcttctctactaaaaatacaaaaattagctgggtgtggtggcgcacgcctgtagtcccagctactcaggaggctgaggcaggagaatcgcttgaacctgggaggcggaggttgcagtgagccaggattgtgccactgcactccagcctggcaacagagcgagactccatctctcaaaaaaaaaaaaagttcgaatctcttataatgcttttttagaagcctgacacttcagacacgtttttcagggaaggtaattgattaaagggaatgaagaaaatctgcatggagtacattgagagcaaagcaatagccatgtgagtttggtaattaggattctttgagtttgtcattgtgagttatttacgtgatgaaagaataaatgtaatcagaatcatgaacctgacatatttgaaagtgttagaggtcttttttggaatttttcatataattaatgcttttattcctttggtaaactgctttcttacattttaaaattaaaaatgtaatatatatgatttatttgtgtggttgaggaattcctaaatactaaagagccatgaccctaatgattgcataagtgatttatttagaaattcttattttattgttgcactgcttatgaaattgcttagggcttgagagataacacttcgattacttttcttaatttaaaggttccagaacgcttgaaagagttttgttcctgctattttgttttgtttttgagatggagtctcgctstgttgcccaggctgtagtgcagtagtgcaatctgggctcactgcaacctctgcccctacccaccggggttcaaacaattcttctgcctcagcctccctagtagctgggattgcaggcacctgccactatgcctggctaattttgtatttttagtagagacggggtttcaccatgttggccaggctggtctggaactcctgacctcaagtgatccacatgctttrgcctcccaaagtgctgggattacagacagttgtgagcctctgtgctcaaccaactgactttaataagtaattgtaatttaaagtttcaatatttgtttgttttcagaaaagtaatatctttgtgttttttcctcaaattataaaagcaacacatactttttttgtgtgaatattttgtaagatatccaaatagtatagaagtggaaagtagggaatatttggtctattatcctcatttttcagagatattagttgaaaacaatattgtatatattcttctgaatattttgttaataactttataaacatcttctatgtatatttgtaaaaatgggatggtagataaacactgttctgaagcttgcctttttcacttgcgtttgtttcatgtcagttcataaagagcttcatgctctagtagtcacaataaaaagtagaaagatcagactagtctgggtattatatattttaaaaaaacaagtgaaaagaaaccatgaaattaattttaacagtgtattttatttaatacaataaaggtatatcaaaattattaccatttcaacttgtagtaaatataaataaatgagatactttatatccttttttcttttttctttttgttttttgagatggagtctcgctctgttgcccaggctggagtgcagtggtgtgatcttggctcattgcaaccttagcctcccagattcaagtgattctcgtgcctcagcctcccaagtagctgggattacaggcatgtgccaccacacctgactaatttttgtattttagtagagacagggcagaaagaaaaaaatctaatagagtaagtaggaggacgaagtgttccagaaactattgacacacacacacacacacacacacacaatgaaactgataggttacctgatttgtttgaatgtatacattaaaaaaatattgattctttttaccaaagaatgtgggtattgtgaacccaaaatatctgacaggtctcattttgccaaggctaaggacgcggctgtgacacagcctcaggaggtcctgacgacaggtgcccaaggtgatcggggtacagctttttttaaatacgttttagggagacatgagacatcaatatgtacgttggtttgatccggtaagacggaacaacttgaggcgggggctttcagttgataagagttagcggggatcataagtaggtaagagacaaatggttgcattctttcgagtccttgatcagtctttcactgaatacacggtttagtctggcccagtgaatctgcatttttacataaaccatagggcagaggaagcaatcagatatgcatttgtctcaggtgaacctcagaggggtgactgagttctgtctgtcctttatccacaaggaatttccttgtgggcaaatggtgagggaggtatgtagctttttatccttgtagctatcttatttaggaaaaaaccaggagacaggtttgtctgacatagttcccagcttgacttttccttggcttagtggttttggggtcctgatacttactttgctttcacaggatgtattagtgatttaaataaaaagtgagacacaacttgtggagagagggaatgtactatgagagacagctaaatattcatcttcataataaatgctcaacagataactaaaaaaaaaagaaatggcatgtatgtatacatagaacatacacacgtattttatatatgtatatatgtatgtatatataacatacagcctatttttatacatgtcactagaaatatgaaggtaagtttaagaagaaactgagagttaaaagtgttctctatgcagaactcaggtagaggaggtgagacactgaattgttcttcatagtaggtttaatggaactgtttgctttttttaaaaaatacacacataattttgtgttacacaactatacgtacaacacatatgcaacacaaaagttgtatattaggggccccttatatggagtgtgtaaaaacattgctgtcaccaaggtagtgaatatttgcatcatttaactacttcattcgattgtcattgaataatttgggaaaaatctctctcctcttgagttattaaatgtttggcaataggtaggtgtggtttttctcttcctgtcttatctagtatttaaatattcaaatttaatgcagcacgtattgagtttctaatatgagcatacatagatagcagtgtgcagggttctcagagccactaccagtagatgggaagtctatagartatttgcagtctagttgagaagataaggtactcatccataaaaatttgataataggccaggcaccgtggctcactcctgtaattctagcactttgggatcccaaggcaggtggatcgcatgagctcaggagttcgagactagtctgggcaatgtggcgaaaccccgtctctaccacaaatacaaaaacttagccggctgtagtggtgggtgcctgtagtcccagctacttgggggattgaggcaggaggattgcaactgttgtccaggctggagggtcgtggtgtgatcacagcttactgcagccttgacctccccaggcttaggtgatcctcttgcctcagcttcccaagtagctgggactataggcacacgccaccacaactgcctatattttgtactttatgtagaaatgaggtttcactatcttgcccaggccggtcttgaactcctggactcaagtgatccacctgcctcggcctcccaaagtgctgggattacaggcatgagccactatgcccagccttcagactgccttgatactgttaactccttaataacaaagtaatagttcttaataagttattttgttatgcattatttgctttaatcattcttttctttttttaaggaaatatgttcggatgattttaaccttcttttgagatggagtctctctctgtttcccaggctagagtgcagtggtgtgatctctgctcactgcagcctcccacctcccgggttcaagtgattttcctgcctcaccctcccgagtagctgggactacaggcgcgtgccaccatgcctggctaatttttgtatttttagtagagacaggctttcactatgttggtcaggctggtctcgaactcgtggcctcaagtgatccgcctgcctcggcttcccaaagtgctgggattacagatgtgagccactgcaccaggccgattttaacttttaacattgtcataaatggtaccctgaatgttctatgtatgtatatataacatatacacatgcccgatttctatacatgtataccctgtttctgtttgctatattttaatttttactttagcccaaagtgaatgaaagtaaaaaataatggactacttttaagtgagtaaggccaggctgggggcggtggctcacacctgtaatcccagcactttgggaggccaaggcaggcggatcacttgaggttaggactttgagaccagcctggccaacacggtgaaaccccgtctctactaaaaatataaaaaatcagccgggtgtagtgttgggcgcctgtaatcccagttactcaggaggctgaggcaggagaattgcgtgaactcaggaggcagaggttgcagtgagccaagattgagccactgcacttcagtttgggcaacagagcaagactgtctctaaataaatacatgaatgcttgcatgcatgctggcttatgcctgtaatcccagcgccctgagaggctgaggcaggaggatccctttgcccaggaatttaagaccagcctgggcaacataggaagactccatctatacaaaaaataaaataaaattagccaggcatggtgccatgcgcctgtagtcccagctacttgggaggctgaagcaggaggattgcttgagcccaggagtttgaggctgcagtgagctatgattgtgctccatctaagaaaaaaaaaaaaaaaaagaatatatgtatttcgtaaatgtatttgtcttaagtttcttctactttaactttctgtttattatttcttcattctaccagaatttatagtttttccagtcttggaaacattgtccccaggagagagatttaaacagaaactattactcttcctcatttatttaaaggaaaatattagtttaatagaagaatgaccagaacttatgcatctctctaataagtgatactctgttcttagaataaattttaggtttaagcgccagctctccatcttccagcaatccatattgatttaactgtattcgtaaaattatgaatgaggacattcctctacggccataccaccctgactgtgcctgatcttgtctgatcttggaagctaagcagggtcaggcctggttagtacttggatgggaggacattcgtggtaagaaggcacaaccctcctctctctcattaagtggttctttggtcaaaaagattaaaaagattttcattcaaaaaatatttgtatatagcacaatatattttatatgttacgaactcatcaaatatgagttaacaaactttgcctcgggggcttgcaattaatagacattctgatttcaaggtagacaataaatgctacagcaaaggcgtagattaagtactctagaagggtagtttgtagaggagagagagggcaggcaaaattaagatttcataggatacttgatggaagaggaaaatcttaacagataaaaagttgaagagaggattttttcttggtataagaaacaatatgtcaaaagtttaatgacaaaatataagcagtatgtcaaagtttaatgactaaatataagcagtacacaaaataagtgctataagagttgactattaaattaataaacttcctttgggaatgtggacacttcccaaaggaggtgggaaattgcagggctcatatgggaaacagcaagtagtttgattcagaagacaggggagggagaaagaaartggaaaaagtattctaggactaagtcaagtggagccatatgaatgtcaggctaaggtgttctgcagaatagttgttaaaatgccctggagtcaagcagactccaggccctagctgtgccatttagcttttgacattggacaagtatttattttgttaagatacaaaattgaacaaggagactgctgtgaggattaaatgagataatgtatgtcaggtgcttagcatagtgaatgaatggtacatagtaaattctcaggaaacaatagcttaaagaaaagacaataaaaacttgaaaagggacactgttgtggtggtaggagtgcttcggaaagttaatctggcaatactgtgtaaaatgattggcaattagaaaagacaggttggagagaaactcatagaaaagttaagatgctcatagaaaaacccatgcaagagataatgtatattatgatttaaggtagtggcatgagaagggagaagctaagagtgtatgtgagatacagaggtagaattgatgggagttggtatagttataagtatgtttagggatattacagttacgattttgaaaatacttcagttttaccccaggaggatagctaatttgtataacaggagtctattatatttttaggatattcatttttaagctataaatattattaaaaacagtttgtcaagttatgacatgtggctcactttgccagcacatactgaaattagagcaatgcagaatagagaataaaattttttatattgttgtaggaaactggaatgttggtagcctagtatcactttacatatgtagtaggaaaattcacacacatatctaccatttctctacttgattgccttcgctgcttggtaaactgagttttttttaggtactttgagcaatagatatcttgttaccacaatcaggtactaaaataaacttgtagtctgttagcatatgtaacagtgaaattaatgattgtgttaaaatttattttatgaagcagtcaattgaagggaaaagataaattttctctgatcatattttaaaggcaaaaaaaggatgggattttgaaggaagcatgtagtcagcatggtatcttacagacatgtaactaacacagcactgtggatgcacattaggatttacccatctgaattttagttaatgttctattgcttctagctatgtgacttaactttcagtgcctacatatgtggaaaacagatatctgacctgtctacctttcagggcaattgtagagatcaaatgagataatatacttggaatcagctgtaaaaataaaaatattttacaaatgtaagatataagtatgtaaattacttataaatttgcccttctagcctatcccttttgtgtcctgtctagcagttaacctgctaaaactcccagtataaatgcaataattaaaaaatagaatgtatcttctcttttccaattcttatccctatccccgcctcgaatccagagaccttattctatgcattttcctattttaaggttccataattctcccagactcagttgacatactcagtattttaaaactctgtttggctcctggtctccaaatcctgtgaaatcattctttataataaccattgtttgaagtgatcacttttcattccttctgctacttccctttatcctgccatgtgtaaaggaataaaacattgtctttattggccactccacttacattttaccctagtcaactctggttacagtatagagtagatttagctttcagaaaatctgttttgttgttcttttctaactcagaaacctttagtctcccattatttgcaggagaaaattcaaacaatttagtgtagcattcagagtcaactctgtctttatcttctatctcttacggtggctctgtttgttaactagactggtcttattctccaactaggccatatatattcttcattattagccatatacagcaaagccatattgcaggtaattttaaaccacatgtttaaaaacccatttctagccagtttgaaaatgttataaattaccttttatcctagtgcctttaaaaaaaactttgctagccttttagatacatttaatcttttattgctaaggagttgaaggtgataatagagcagttcaagtaaccaaccatttgatatccttgatactctttagcttctaaccagtttctgccatgagcgtgtggtcttgaatatttccaaaggccttcaattttgtgtttattaggagcaaatagggaattttctgttgatgaaaaatgaaacactttttacttcaggaaatgttatgtgtaatatatagggaccctaatttgtctaattgaaaagaatcatgatgctctcttgtcctcctcccacccctttatattgcagggtaaacagggatattcagatttgtaaaggaaaatggtgaagtatgcagtccccttgtgccctgggagtacttaaggtcagagctcaactttagggataaaaaaacaagaagagactattaggtatttgaatatgcaaatgtacttcatagaatttcattgtttaaaagagaatctctatgaacaagtgaaggaaatcttaggaaggtacccttcgaaacactgaactaagaattaatctttaaagattttccctctcttctcttagtataggataagactaaagaaaaataatggcaacagttaaatgcttctgttctgatgtcatacagacttggtgtgtgttttggctctaccacttagatttctgacctcgaaaaacaacttaacctctccctacttgtytttctcatttgtaaactgatgataactttgaggagttggaaggattaagtgagaagatatataggamactgttggcactgtgcctagcaagtagtgttgctgcttttacttctactgtgacctcctccatcactgcttactcaaccatttaaataattgttctgctcttgtcctctgtaaaataggggtagtaattctttctatttttttagaggtggggtctcactgtattgccccaggctggtgtatgctattcacaggcatgatgatagccccactatagccgtgaactcctgggcttaagtgatcctcccacctcaggctcccatgcaagcacctgggactacaggtgcatgccatggcactcggcaataatttctttaaatgaacatataaggttggtgtaaggattagatgatgtcgtggacatgcaaccatatgtacaagagtacccgttaaaattgtagaatgtttattttaaagtgtttgttaggccaaatactgttttttaaaacctgtctcctcgtttgtcattggggatgacagtsgtatttaaatttgtagaattgtttaaagattaagtatatttaacatatgtagcacagtgttgagtacatagtgagaatcagtaaatattaatagtattagctatgatcactaagtaggttttggctatttgatgtaatctcattcgtctgtttttgcctttgttgcctgtgcttttggggtcaaattaaaaaaaatcattggccagacccatgttgtgttattttttcatgtgttttcttgtagcagttttgcactttctgatctcacgtttaagtttttgaatccattttgagttgatttttgtaccgtaaatggtatgagtaaaggtccattttcattgttctgcatgtagatatccagtgtggaaataaattttttaataaaatttgtaaatgaatattttaggatctagatggttagtaaattgtaaatgcaacagtgtttttttcgagctcttttgtccacattaccttgttttaatttttatcccaaagccattgtatggcctagaatcatggggtgagaataggaacttgtaaactaaatctttcagttacagatgtgttatatatatgctttttgccagaaatgcaaaagctgttaagtctcaagtttacatctgagaaagatgtatcttctaagctaatgatactgccttattgatatccaacagaattgtcaggaatcatattttttttttccatccatgagggcagatgatttatgtgggtttaagttataatacatgttactctttattctcctttgaaatcttactgggtttttactttgaagattttttaaattgggattttgcttccattccttacaaattttgtctggtatagtatattctaaatacagtttgtttttaagctatgaaaatagcagttgtttctttggaatgtaattatctggatgacaaatgaaggtactttgatcagaagcctaaaccatgaactatatggaattttagaaatgccttttattataggacttgttagggtgttctactaaacagtaaacccagagcctgggcatggtgactcatgcctgtaatctcagagattcgggaggctgaggtgggaggactcttgaggcaaggagttgaagaccagactgggcaacatactgagactctgtctctaagaaaataaacaaaaagtagctggatggtggcgtgtgcctgtagtcccagctacacaggaggctgaggtgggagggttgcatgagccaggagtttgaggctacagtgagctgtgattatgccattgcactccagcctgggcaacagagcgagaccctatctctatttaaaagaaaaataaaaaagccagcgcagtggctcacgcctgtaatcccagcattttgggaggcaaaggtaggtggatcacctgaggtcagaagttcaagaccagcctagccaacatggtaaaaccctgtctctactaaaaatacaaaaattaaccagttgcagtgacacgcccctgtaatcccagctgctctggaggctgaggcatgagaatcacttgaacccgggaggtggcagttgtggtgagccaaaatcgcgccactgcactccagcctgggtgacagagtgagactccatctcaaaaaaaaaaaaaaaggaaaaaagaaaacaaagtaaacccaggacatttgcacttggtcttgtaatttaaaggactgtatctgtccattaaaaaacttttaaaaaaaatctgtaaaagtattatttattttttgtagagacaaggtctcactgtgttgccaaggctgtctcaaactcctggtctcagtgatactcctgtctctgcttcccaaagtgttgggattacaaatgtaagccaccatccctggtgtaaaaacttcttttatattgtgcccattgagttaaacgagttcagtttactttgaatatatgtttaaaattaaagaaatatatatttatttaaaagtctttttagttctgtaatgtaagaactcgttttttagttagatcatggggactttatttttgtttaggttgtgccttttttactgaataataatttcagagctaatccactgcatgagtaattcaaatatttcaatttttttttgaggagtctcactctgttgcccagtctgaagtgcagtggcgtgatctcagctcactgcagcctctgcctcctgggttcaaggaattctcatgcctcagcctgccgagtagctgggattacaggtgtctgccaccatgcctggctaatttttgtatttttagtagagacagggtttcaccatgttggccaggctggtctcaaactgctgacctcaagtgatccacatgcctcggcctcccaaagtgttgggattacaggcatgagccacctcgcccagctgaaatatttcagtttttacttgtatttatttagttttggacatagctaagtttcttctgcaaagataggtcattcattgttggaaacttaaattcatacaagaagttacacagttatcaagtaaatagagtcttttatgtgatgtcagtatacgacttgtttttggaatatacagttatcttttaaaaaaacttcgtttcttggctgggcacagtggctcatgcctgtaatcccagcatgttgggaggccgaggtggacagatcacttgagcctaggagttcgacaccagcctgggcaacacagtgaaaccctatctctactaaaaatacaaaattagccaggcgtggtggcccattcctgtacccacctactcaggaggctgaagcgggaagatcacttgagcctggggaggcagaggttccagtgagccaagattgtgccactgcactccagcctgtctcacagagcaagaccctgtctcaaacaaacaaataaataaataaatataaatttggtttctttgagatataatttacatgcaacaagatgtcattttaagtgtataatttgaggttttgttttcttttaaaatcagctgaataggtataacttcaattaaaattcattatttatttatttattttttaatgagacggaatttcactcttgtcgcccaggctggagtgcaatggtgcaatcttggctcactgcaacctctgcctcccaggttcaagtgattctcctgcctccccctcccaagtagctgggattacaggcatgcaccaccacacctggctaatttttagtagagatgggggttcatcatgttggccaggctggtcttgacctgctgatctcgggtgattcacccaccttggcctcccaaagtgctgggattataggcatgagccactgcacccagcaaaattcagtaattttaagtgttcaatttaatgaattttcaaaacgggtttattgaggtataatttatattttataagatttaggttttatgggaacagtttaagttttagtaaatttatatagtcatgcagactgtcactgaaatctaatattaggacacttttatcacatgaaaacatttcctccttgcctttttcagtcagaatctgtttccatctccaggaaaccaccaaactgctttttgtaatagcactagttttgcattttctagaaattttgcacaaatggaatcatactcgtgtctggcattgtgtttttgagactgtgttgttggatatgtcagtagtttgtcctttcttattgcattttttgtttatccattttattccattttatccattgtattctattttttatttattcattcccagctgaaggatagtgtgtggttttagactattattaatattgctcctatgcatactcattacaaatctttctttgtgatttttacagataaaaacatgtttatttctttctcttgtgtggaatgtctcagtcatatggaaactgtatgtttaactttttaagaaactgccagactctacmattttacattctcatcagcattatatagaggttccccttccttcacattctctccagtgcttaatattgtcactttttaattttagccattttcttgtttgtagtgttatttcattgtgtattttttaaacagcattgttgagatagaactctcatacgatcgaattcatctgttacccgaagggggtcccgatccagatcccagagagggttcttggatcttgcatgagaaagaatttggggcaagtccatagagtaaaatgaaagcaagtttatgacagtaaaggaatgaaagaatggctactccataggcagaacaccgacatgttacttcttgattatattctaagcaaggggtggattcatgaattttccgggggaaagggatgggcaattcgcagaactgagggttcctcccctttttagaccatatagggtgacttcctaacgttgccatggcatttgtaaactgtcacggcactggcaggagcgtcttttagcatgctaacgcattataattagcatatagtgagcagtgagcacaaccagaggtcgggatttgcctcgcttctttaccccaacctgttttgtcagcagggcctttgtgacctgactttgtgctgacctcctatctcatcctgtgacttagaatgcctaacctcctgggaatgcagcccagtaggtctcagccttattttacccagcccctattcaagatggagttgttctggttcaaacccctctgacacatccctttcaagtgtgcaaattcagtggattttagtatatttagagttgtgcaaccatcaccacaattaatttgcatcattccgcaagagaaacctgcatgccttggccataattctcccacccattcacccccagttttaggcaaccactgatctactttttgtctctctatatttgcctcttctggatatttcataaatagaatcatacagtatgtggtcgtggtcctttgctgctggcttctttaaatcctgtttgtagggttaatctatgttgtagcatgtatcactacttcatttttattttccaataatgtttcatataggattatacaacttttaataaattcatcagttgaacatttggattttttctactttttttgctattacgaatactgctgctatgaatatttttgtacaagtttttgtgtgtgtgtgtgtagatgtatgattttatttctcttgatttatacctaggagtagaatcgctgatatggtaaccctatgtttagccttttgaggaattgccagactgtttccaatgtgttattggaaagtttccatttgacattcctaacagcactaatatacaacaacataaatttttaaattgatgtccattagatacaggggtcatggtgcatttttatgatttctgactaagaaatcctagctatctgcagacagaattggttatcatattgaattagtctttctcttcctcctttaccccccaaaacactgcagacatgtacatttgatcaattgtctcatttttcttttttatagaataagaaagccttgagttttgtgaaaaaccggagaagagaaactaaaaggacagtagaaaaggcttttccagtttgcataatgtaagttcttttcacttttcttggcttgaattctgccttagctgacaaagctgtttctatggaaacaaatagtttaacctcttagaatgtcagaggaatgctgatcacttaaaatgagacttcccagctgctggtcaaagggcattacttgctggagaaagaggggaaggatgaatttaaaaaattctagagttctggacactagtgtagactgaacatgtttatgcgtatgaagtatatctcttctattttactctgcctaaaaattaagatactggtaatataggaaattggatttctgctgacctgtcttgattctcagctcttaaacaaatggttctattcgttggtacccttttcagtgggtctgtaccctttaggctatttcagtccctccagtctcaatcatttgcacttgttgtgaagcttatttagcttcccattgcccccttctcccgcaactaaaaccctttctcccttactagtttgaggttagcattgaaacagcttcggcatgccagcctgaaaatttttcttgctttgtggactatgtaaagatttttgtatttgtgttcgttttctggcagggatgggagcagggattctgatgaggatttgaaatgtagtcctttgaagctttctttctttcttattttttttttaaacttataattggcaagttgagaagaaaagaattagggccagtaactgcctctgctgtcttcataagatggcctgttatttacacacaatgaggtaattctctagttcagtcatttaccagcttctgaattgtcaaaggacttttttttttttttttaaagagagggagagtgcaattgctttggactgggaggactttttcacttttatgatgtatatagactacatgtatgggctagagtatttgtggagtgcctgcttaaaaattataatcttaatgctaaaactataggatacagtataatgtttctttaattctggaagaactttaggatctttcattgccttcattaaattaacttgtgagcattatagagtttttggagtgttaaatggtgaagtaattatttaacaggatagtctggaaagatttcttgtagaattagggacttgagggaggtcttgaaggtagaaatcaatggaaaagtagttcatcagtcatttgggcagaaagatgggatagacacaaatgaggaaggtaaattagaaggctcatgcaggtgcgtagtaaaagatatagctagaaatcttggattcattttttgagtttgaagtttattctccaggtagtgtgaaagccatcagaagttctgaacagaggagtggtttgctcatatacttaattaagcaaacacttagcaggtatcacggctatagaggtcaacaagacggatccctgccaattagataatttacctgtgtgatctacagttaccttgaaattaatgtgtctaaacccatatttccctttacttctatctgattctcctatattctccatcataattagtgacattgtcatctacctaataagccagggatagtggttaagagtgatggttctggagttatactgcctaggttcatattctgaagccttctgttgtttggccttctgctgggcaatgttacggattcagagatgggtcagcctggttcctgacttcaaggagcttctagtctgatgagatagaaaggcagagatataaatagcagtagtccaacttgatcaagaatgtgacagggattataggattccagaggacagtgtatttgagctcagacttaaaagagtaggcaaagatcagatcctaggcagtctgattctggaggcttttctcttaaacatgctgtcttgggtaactggatggatgtagtgacattagttagaattgaaaacagggagaggattaaagagaataggagattaaagggaaatatgagtttaattttggacatatttctagattcttgtgggaaattctgatagatagaataatggtcagccgggcacggtggctcacgcctgtaatcccagcactttgggaggccgaggctggtggatcacgaggtcaggagtttgagaccagcctggccaacatggtgaagccccgtctctactaaaaatacaaaaattagctgggtatggtgattggcgcctgtaatctcagctactcaggaggctgaggcaagagaatcgtttgaacctgggaggtggagtttgcagtgagccgggatcgtgccattgcactcaaactggacgacagagtctcaaaaaaaaaaaaaaagttcaaggatcctgtcttaataaccatagtatctagccaggggtaaataattaaatttgtrtacaaatcactcctcttttttaaatctttgatgattctcttattctatggaattaaggatttgtatttaagacctttcataggatggacccaatcaaactttctagtcctatcttccactactctctcgactattttagttcaacgagccttatttgtactttcccctcacacctttcatcttcccacctttggttcatatggcccctttattatttctccatcttgtctttaaggcctacttccaacctcgtttttcatctacgaaatgggcatatttggatctacttctggagttgtaatgaggaataaatgagtgaatactatgtgaactgcttgcagtgttggctggcacataaagaagtgctcagtaaatgttagctatagttgtagttgttactactactaccactattcctactcctatgacttctttctcctcctcctcctttacctctttctcttattcactttttgccctcctatatgaagtagatactaagttctactgattctgtaacctacatattgcttttgtttttgagacagagtctcgcgctgtctcccaggctggagcgcagtggcacgatcttggctcactacaacctctgcctcctgggttcaagtgattctcatgcctcagcttcccgagtagctgggactacaggcacaagccaccatggctggataatttttaaattttttgcatgtttttgtagagatggggtatcaccatattgcccaggctggtctcaaactactagtcttaagtgatccacagcctcagcctcagcctccccaaatgctggaattacaggcgtgagccaccacgcctggcctgtaaccttcgtatttcttgaaaacaacttcttcattctcactgtcctagttgaggaccgcatttctaataggtgctttcagtctgttctcattgccacccttcagtcagccctctatgcttcagtaggagtgatatttctttctttttttttttttttatactttaagttctagggtacatgtgcacaacgtgcaggtttcttacatatgtatgcatgtgccatgttggtgtgctgcacccattaacttgtcatttacattaggtatatctcctaatgctatcgctcccccctcccacctccccaaccccacgacaggccccgatgtgtgatgttccccaccctgtgtccaagtgttctcatttttcaattcccacctatgagtgagaacatgcagtgtttggttttctgtccttgtgaaaatttgctcagaatgatggtttccagcttcatctttgtccctacaaaggacatgaactcatccttttttatggctgcatagtattccatggtgtatgtgtgccacattttcttaatctagtctatcattgatggacatttgggttggttccaagtctttgctattgtgaatagtgccgcagtcaacatatgtgtgcatgtgtctttatagcagcatgatttataatcctttgggtatatacccagtaatgggatggctgggtcaaatggtatttctagttctagatctctgaggaattgccatactgtcttccacaatggttgaactagtttacactcccagcaacagtgtaaaagtgttcctgtttctccacatcctctccggcacctgttgtttccgactttttaatgatcgccattctaactggtgtgagatggtatctcattgtggttttgttttgcatttctttgatgaccagtgataatgagcattttttcatgtgtctgttggctgcatgaatgtcttcttttgagaagtgtctgttcatattctttgcccactttttgatggggttgtttgattttttcttggaaatttgtttaagttctttgtagattctggatattagccctttgtcagatgggtagacggtgaaaattttctcccattctgtaggttgcctgttcactctgatggtagtttcttttgctgtgcagaagctctttggtttaattagatcccatttgtcaattttgggttttgttgccattgcttttggtgttttagtcatgaagtccttgcccatgcctatgtcctgaatggtattgcctaggttttcttctagggtttttctggttttaggtctaacatttaagtctttaatccatcttgaattaatttttgtataaggtgtaaggaagggatccagtttcagctttctacatatgcctagccagttttcccagcaccatttattaaatagggcatcctttccccatttttgtttttgtcaggtttgtcaaagatcagatgattgtagatgtgtggtactatttctgagggctctgttctgttccattggtctatatctctgttttggtaccagtagcatgctgttttggttactgtaaccttgtagtatagtttgaagttggatagggtgatgccttcagctttattcttttggcttagggttgtcttggcaatgcgggctcttttttggttccatatgaactttaaagtagttttttccaattctgtgaagaaagtcattggtagcttgatggggatggcattgaatctataaattaccttgggcagtatggccattttcacgatattgattcttcccatccatgagcatggaatgttcttccatttgtttgtgtcctcttttacttggttgaccagtggtttctagttctccttgaagaggtccttcmcatcccttgtaagttggattcctaggtattttattctctttgtagcaattgtgaatgggagttcactcatgatttggctctctrtttgtctgttattggtgtataagaatgcttgtgatttttgcacattgattttgtatcctgagactttgctgaagttgcttatcagcttgagattttgggctgagacagtggggttttctaaatagacaatcatgtcatctgcaaacagggacaatttgacttcctcttttcctaattgaataccctttatttctttctcctgcccgattgccttggccaaaacttccaacactgtgttgaataggagtggtgagagagggcattcctgtcttgtggcagttttgaaagagaatgcttccagtttttgcccattcagtatgatattggctgtgggtttgtcataaatagctcttattattttgagatacattccatcaatacctagtttattgagagtttttagcatgaagggctattgaattttgtcaaaggccttttctgcatctattgagataatcatgtggtttttgtctttggttttgtttatatgctggattacgtttattgatttgcgtatgttgaaccagccttgcatcccagggatgaagcccatttgattgtggtgcataagcttttcgatgtgctgctggatttggtttgccagtattttattgaagattttcgcatcgacattcatcagggcttttggtctaaaattctcttttttttgttgtgtctctgcccggctttggtatcaggatgatgctggcctcataaaatgagttagggaggattgcctctttttctattgattgcaatagtttcagaaggaatggtaccagctcctctttgtacctctcgtagaatttggctgcgaatccatttggtcctggactttttttggttggtaggctattaattattgcctcaatttcagagctattattggtgtattcagggattcgacttcttcctggtttagtcttgggagggtatatgtgtccaggaatttatccatttcttctagattttctactttatttgcgtagaggtgtttacagtgttctctgatggtagtttgtatttctgtggggttggtggtgataccccctttatcattttttattgcatgtatttgattcttctctcttttcttcattagtcttgctagtagtctatcaattttgttgatcttttcaaaaaatcagctcctggattcattgattttttgaagggttttttgtgtctctatccaataggagtgatatttgtataaaaatgaatgtgatcatgtcatcctctgcttaaaatgttttaattattcttactattttcagggtaaagatctaaaactcttctcagtgtggcttcctgcttgtctttccagttttatcattattcatgtacagcatgttcccattgtcccatccagctttattgtattctattctgttttctgaaagtgccattctgtcatactcttccttcctattggtcatgtgagcctgtctgcctggaatagacctttctactatctggctaatttttagttgccctttgaaatccatttcaaagaaatgtatccttatgttttgagtgtttcctatcaccttttaccacagaccaagttttatagttcattgtgacattccaagttgagttgaacagatatttattggacatttcttatgatatgtattaggctaagcactggagctataaaagtaagacatgacccctgtctctaacaaatttagaacctgttaaggagattgaggaaaaataatcatttattttctttgctttctctcccagtagactgaacattcctggggagataaccaaaatgaaatttaaagcagattactaccaggttatagaaatttttctgagagcaaaggttggatccagatatacaagtatgatagtaaatagtacaagcatgagaattttgacctggatgacctggcccggtctctcttgcatgacttctaattttccctcatagtgtagtgaatatggacacagatgtagagcttttaagctgagtttcaaatttcagatcataatttatattagttaaaaacacatcatttaatattaaatttgatttttaatatccagtaattgttatagagagggttaagagttttaattttctgaaaatactaaatccactcctggatttttaaaactaagcatagcactgtagtaactcctacataatttttctgcttacttgtaatgaaaacatttaaaaagctgaatttgcatttgcatataatcaatgcctaacataacttaagaattgcctaacaaaaatcaaatagctgtcatgttaatgaaaacgaaggcagtctaatggtaaataaggtgcttacgtgtagatcacagttagaaagaagtcaaaatttggatgaaagacagaaaaatctaccaaaaattttaagcaaatgtagttttaataatagctcttgtaactggcatcsattttcctgattgttggactagtggttttcctgatagcctagttgggtttgtattaagcattttgtcttctgtccctgtttgcattatgacccaagatgtttgagaaaagattggctggtattaggaatattatctgaaaacctggcttttgcttagttggcattgtgctctaaccaacttgtttactaaagtgatgcccaactcaaggaggtagtaggtttattactgtaaatattattgctcttgagtgaaaaaaaaaaggctaattagatttaatgtgtgggtttacacatatgtaaacaacctgcctatgtatgcctgagaaatagcttgatgaaaagccagagttatctggtaaaatatttttattttctaaaatatgttgaaagatttttaaaatagaatcaagttaatactggtaattaatgtaagtatacattaactcatgtgaaactcagaactgtcaatcctatgaataaagcttccaagtgaatctgagggtcaaagagagaaaatgactggtcttaagtcataaaactagaggattaaaagttcagttttcttatctccctgtttactgtgatctttttgctgtacagtatgactctcaaaagtttttgagtggtaacagatacaaccgttttctctaaatgaatccttgtaattcttgtagagttaaccccaattcttttttttttttttttgagatggagtctcgctctgtcacccaggctggagtgcagtggtgtgatctcagctcactgcggcctctgcctctcaggttcaagcgattctcctgcctcagccttctgagtagctggggttacagacacccaccaccacacctggctagtttttgtatttttcttagtagagacggggttttgccatgttggccaggtctcgaactcccgacctcaggtgatctgccttccttggcctcccaaagtgctgggattacaggcgtgagccactgcacccggcccaattctttttttttttttttaatgggaccagttataaagactgataacccatgtaatccttgtctcaatgtagttttgtcctgtagctgcctcagctgctaattgaagtttcttattcgttgggcatgttctccatctcaaaaactcttaaagatgaattatcccccagaatactgcttgtatttcaagtgaggtacaaacaaggctgctatatgccaaatcagttgatcattcatcaatttctttagcagttattctttagcagtaagttatttcaatcccatgttaattgttgagcataaagtacagtgttgagacaactactaaaagatgattaaaacaccttttatgtttgaagcaagcaacgtgttctctaccaaactagtaccccaaactttttactttcctactttgctaaactttccagtattgtatatcatttttcttagctttaaaattgaatagtatgtttcacatttttggaaagggactttttgggggaggggggaatcttgatttcctcaccattatctgtaaagtgaaagtacttaatctacttaacaaaataatattacatacttattattttctacgttgtatggtgattagaagtgggctctgtaaaaacctgcttttatattgtaattcttacacttttttcccccccatctttccccttagatttccttcatggatactttttcatagcattattatgtgatgtgagaagtttttttttttgaagtaacatggattttatactacagaatcaagagaattggcttataggaaaaattgatttataaaaagtggtacaggttttcatagataaccatgacaacatcccatatgaatgggcatgttacagaggaatcagacagcgaagtaaaaaatgttgatcttgcatcaccagaggaacatcagaagcaccgagagatggctgttgactgccctggagatttgggcaccaggatgatgccaatacgtcgaagtgcacagttggagcgtattcggcaacaacaggaggacatgaggcgtaggagagaggaagaagggaaaaagcaagaacttgaccttaattcttccatgagacttaagaaactagcccaaattcctccaaagaccggaatagataaccctatgtttgatacagaggaaggaattgtcttagaaagtcctcattatgctgtgaaaatattaggtaagtaaaaatagaggtataacagaaaacattttgctttaatttatctgtgccttataatgtatatgagaaggaagagggtttaagagaatgtaagtaatgacagtttgaattccagaccaagatcctttgttttcgtggaaacgccgtataactattgtttactgttaccaacatagagctaaaagcatgtggcttaaatgttaagtcactataacatgtttttttagatattaaagagttctgcatgggccctaacatttaaagccttgaaatttaccttttatatcaaaccacaaactttatgcaaaatactaaaaaagaattttcagattttgaatttctgatttccttaaagttttgtaaaatagtaataaatttgtaactacagtttaaattctttgatttttttaaattaatgattgtcaataaaaagaactggtattgttcatatggtatcataaacwtaaaataatggtattttctatatccccaaattctgttctgtggggggaaaaaaagtcctatgagatataagtagatacaaccgaaccaaaagaattctgtgaccaaatggattttgagaactctgggctaaataagttaaatagcttcttatcacgggacttctcatagctgttagaatgttactaggcattgtgaatctacaagagagattgatatcaaatgcatgtttccaaacttagaatatttaatcattgaatttactgcctgcccttcttgcacgtgcacatacacccaagtgctcactgaactagtgttaggagagcattttattttttggtggtttgctattttttaggtgtgaaaaaagatatatttctacttttttgtagaaggagaaagtttttattgtcattgtcatcattttgccattcatttaagggtctgtttagcctgtactaagtgttttagcaaacattgtttcatgtaataaaataatcctgttaacagtactctgtaatctccattttggagataaagaaattgaaccttagttaaacaactttttaaagacaccaatggtagagccaagtttgaatttgccagatcaggtgttgatgtactacacaaaatggtttgaatggaaaccggtatccagcctgcgtttcactcaccaggccagagctgtggctacccagaatagagcacctttttctaatttggccaaaggtaccatgtatatgccagatttgttcctcattaagtctctttattccaactctggagcagtttccttccttccttccttccttccttccttccttccttccttccttccttccttccttccttccctccctccctccctccctccctcccttttctttcttttctttctttctttttttttttgaggtggagtcttgctctgttgcccaggctggagtgcagtggtgcaatcttcggctcacagcaatctccgccttcccaggttcaagtgattctcctgccttagcctcccgagtggctgggattacaggcatgtgccaccacacctggctaatttttgtatttttagtagagaccgggtttcaccatgttggtcaggctggtcttcaactcctgacctcatgatctgccctccttgaccttccaaagtgctgggattacaggtgtgagccactgtgcccgtctcaagtctggagcagtttctactacatcacatcatcttcttttctttgttataaatttttattcaggatccacatttcatatgtacatgcttttctgtgttttaagaaatcatagatatgtgttcagtcatagtgaagtctgctaaattcctgccttcagacattttaattacagtgaaagctaaaagattacatttttttaatacctttatgtgaaagaattttatgctcttttttcctgagggttttattagagtaaaaatacttcattcctgattgcttcttactagccttcatttcccaccactctattattatttatttatttattaaaatattctgaaaatattttattggagaaagtttgttatatccagtgcaaacctggattgattcttctgtttttctgtttacattcccttaagattaaagtatttgtccatttggtttacttagaatcaggtgtaagtatccatctgataggtaatattcatgtaatcacagtaaagaaacaaatatagcttcagccggattcacttagtaagagaacagttgtgagtttatggttttgtttgttttgcctaagcacacaaaattggacatcatttctcttaattttttttttttgctttttcctgtttctgtttgaatgttctattgctgacttttttacaaattcagattaaaggatacctctattccaatgtgtaatctgctgtggtttttaaaagtacctatgtgtggtccttgaatttaaggcagttttgtgtattttattttaaagtaatttgaaatgtcataacaggtatttgtaattcatttcttggataggagaagatgtattttgagaaataaatgatatattttatgttgatatagtcaacacagatatctgttatgtaagaatcatgagaaattagcataaggtatagtttgctattgtcagtcatagcctcaggtttttaactttttgtttaaagtgaagtgtaatagctttttgccaaacttttttttcttgttcataatctgctaacacatcaaactgtaagagaagtactccctgaacattgtgtgtgtctcctggctagtatttgattaatacccatatgacaggagacaacttctcagcctttttcacatctagaaacagcaaccttattttaaatgagggaagaatgggcaactgatttatttctctgagaggaagccttcagtttctaaacaatacatcatcatttatctgtgagtagacaaagtattcttttaagaatcaaaaatatgattggcaagattaagtaattgggtggtttttaatgaaaagcatttgtaaatttgacaatgtatgataataaaagtacagggatggaattgatagaaaatactcagaaaggatgaactgaattttcttgtttaaaagcagttagaatttttttgaaagataagaaatagtgatatgggaactagatttcaaatgaataattagtattataaatggtaaaaaatttgatattagggaggctttccttaaaattggcattagtttttaaagcttgctttgttacaaatattattgtctttgttctctttcataatcagagcaaactaccttgtgagagaaatcctcggaaaagaaaataatgcaggttagagtgggttaagctagagtagggtaattttcatatatttctatattatagatttcactgtttttgtgttctcagttaagtaattttgggccagggatgtggacaaggaaatatatagatagaatacttgaataaactagggatgactgccatctatcatatatgtgactataaaattgttgtctttgaagcagtgtcaggaaagggaacatacacacccatatatatctgtggtgagctgtttagtggttaataaaaagactcctggaatttgtgattaggggctttctaatctatgagatactattagtgtgaagaaggaaaaacacaccacggggaagaaaaccgggatgaataaagctaaagaacaaaatattttcatagaattaatagcatgtttcagtcttaattagtgtctgcatattttttgtcagatgtctctggatattcaaactattaagtcaaaagattattgacattttaaagtaaaatagctctttcagatttcattctggcatttaactgacttttgattgatcatggggcatactggaattttgtgtgattgtaaacttttttaaaggttggctttaagataaagtttatttcaagccaacagacaaaatcccartgccagtaaatcttgagttttagttcagcctgcttctgagaagttgattatttttactatcaaatttttgtttagctattgttacagatatttccaaataaatgttattagccattccttcagggaatttttttttatcttcctggaattgaaataattaaatctgttgtcactagatttaatgtttgaagtgttgggatcatttgagaattctgtgatttagtcaggttgctaaaattagacctaaagatgtaaaaattcattagagtatatgtatagtaatgtaaattttgtttattaaatacacataattctatagaaaagtaactgctacatcattcagtctttgacacaatacgttgaaacttcattccacttattaagcagtagtaggttttaaaacttatttctgcctgcgaagatttgcttcgttgtcttacggcacattcagaaatgtatgcggtagctgcatattggaaagtagggataatagagtcaaaactgagtttaaatactttttaatgtcactaaattgcgctattgactttgggcatgttactcaatttttctgagcctcggtttcaggattttcttgaggaccaaatgaaaaaagcatttgagtaaatggcacactacaggtttgaatgaaatttaatttttgttagaaccagaagctacagagagatcatctaactctgtagtccataaaatttgtggatcttaaccactaatttcttatttcattttaaaaataactttattaaggtataattcacataccataaaattttgtcttttaaactgtagaattcattagtttttagtatactcacaaggttgtgcaggcaggcgtggtggttcacgcccgtattagtagcacctttggaggccaaggcaggaggatctcttgagcccaggagtttgagaccagcttgggcaacatagaccctatctcttaaaaaaaaaaaaaaacagctgggcatggtggtatgcttctgtagtcccagcatactagggaggctgaggcaggaggattttttgagctttgagcccaggagatcgaggctgcagtgctaaaaaaaaaaaaaaaaaaaaaaaaaaaaaaaaaaaaaaaaaggttgtgcaatcatcactactatataattccaaaatatgtacccattaatggtcactccctattctgtccaccacctggcccttgacaaccacgaatatactttctttttggatttgcttattctagacattttatatgaatgaaattacataacataggctcttttgtgactggcctcttttcacttaccattatgttttcagggttcatccatattgtagcatgaatcagtacttcatttcttttttatggatgaattaatattccactgtacaaatataccacatcttgtttttccattcgtctaggttaaaaaatttttatttttatttttatttttttgtagagacgggatctcactgtgttgcccaggctggtcttgacctcctggcctcaagtgatcctcccaccgtggccttccaaagtgttaggattagaggcatgagccaccacaattttaattccacaggtagatgtactggaaactgatgtaatttcctcctacttagtaatattaagttccccatctgagtatcatatttgaccctacagtttagaggaaaagaaatcttaaaagtttcagaaaaaagtcatgaagttggttggacttgaaatttctgaggacaggttaaaagagttggaattatttacacaatgaaatggaaaagcttaatgctgggtataggtccctagaagctatctgttttcatatggggtaaatgagagtaatatataaaaataaatgatgccaatccagatggagattccttaggtaaattttttttttttttttttgagacggagtctcgctctgtcgcccaggctggagtgcagtggcgcgatctcggctcactgcaagctccacctcccaggttcacaccattctcctgcctcagcctcccgagtagctgagactacaggtgcccaccaccacccctggctaatttttttgtatgtttttagtagagatggggtttcaccgtgttagccaggatggtctcgatctctgatctcctgatccagccgcctcggtctcccaaagtactgggattacaggtgtgagccactgcgcctgacccccttaggtaattttaatgtttacccttataaccaaaaaatcttccacatggttacccagagttctaggcattggaaagtaggattttctgataaagtaactcttggtgattgctttctgttgcctgtttcagagtccattcttttacgttttagactgacaggagagggcaaggagggaggacagagtttacgagggtggatttgtggacccatgtgtatgtttgtattcatctgattagttgtatcctaaagccaaatgtaagtgaattttcttactttagaataatatattctctcttttaaataatmaagagttaaatgttgcgtgaaatattagagaagatgggagcttaatttctactgaaaaatcaggtaagaggaaatagctccacctacagggcaaataatttaaactagatataaagaaattccttgtaggaaatttgttacagacttgaatttactaccaaagctagatttgctatgcctgcctctaccttctcctgggcagagtgcctccatcccgccttagtacttacttttttgtccactcccaacctagcacatatatcagtctttctcactagccttgtggttcttcatttctctctttctctgtccatgtggttccttcttgtgtctgttgtctgtctgtatgggattggggaagggaatttcttctctctgtcctctgtcttctctttgttgtctctgtgtcttcatcttttattatggaagagtgtatttgacaggactgatttagttacatctgaatggattttttaaattccctgcagaattgtatagaatgttgaaaaacttaggtggatttttgtttaagtaacagatatatccatcaaagaatggaacatttctttgagtgtgtggaaaattaactgttcttagccgggcgtggtggctcatgcctataatcctagcactttgggaggccgaggtgggtggatcgcttgagctcaggagttgcagatcagcctgggcaacctggtgaaactccatctctaccaaaaaaaatacaaaaatagccaggtgtggtggaatgcgactgtggtcttagctacttgggaggctaggtgggaggatcgctggaacctgagaagttgaggctgcagtgagctctgattacgccactgcactccagcgtggtgacagagtgagacctggtctcaaaaaaaaaaaaaaaaaaagaaaaaaactgttcttgaataataygtatttgtgaagtgcttttaaaaatgtaccctttatggctgcgcgtggtggctcacgcctgtaatctcagcactttgggaggccaaggtgggtggatcacttgagtccaggagttcaagaccagcttgggtgacagtgaaatcttgtctctacaaaaaatacaaaaaarttagttgggtgtggtgttatgcacctgtagtcccagctactggggaggctgaggtgggaaggatcacttgagcctgggagctcaggactgcagtgagccatgttcacaccaccgaactctagccagggtgacagagcgaaaccctatctcaaaaacaaaaacaaaaaaaaagacactggagattctggttatgattaaattagaactgtggcaaaataggtcttttacatttccttagttttttttttccataaatatattggattaaaagccattgttctgatataagaaaaaaggatgaaattatattaagtatgttctagttaagactacagggatatcagttaaattctacttattaaaaagcactctagtagtaaaatgggcaaaagataaaatggatgaaagaagaaattcaaatggctataacttgtaaaaatatgttctatcataccagatcccaaaaattaaaagattgataattcttaaattgatttgtgtttgtgagaacagacattcatgtgcaacgctggtaggggtatgaattggtacaaatccagaaggcagctttggcagtatgtgtcaaagtgttaaatgcttttgttatctgattaataattttatcctagaaatttattctaaggaattggaaaataggttgcaaaacaacatttacagtgtcatctatacggttagaccagcattttaaaagtttgaaaggctacatggcgtagcaaaataataccagtagttaacagccgaaaggtagaagtacaggtaattttcaaaataatgtcagtattttagtgtccttttgagtggctttggtacataggagagattatacagaaactccttggccttaaaaagtttaaattcccctgaggttgaagagacccagtagggatacaattaccttctgggctgtctatggctgcttgttgatttcagtcagtggtgaaatctgaggccctcagtctttcacaacacactaacagccaggctggggtctccctttttttttccttcgagacagagtctcactctgtcgcccaggctggagtgcagtggtgcgatctccgctcactgcaacttccgcctccgaggttcaagcgattctcctgcctcagcctcccaagtagctggcactttagacatgtgccaccacacccagctaatttttttgtattttcagtagagacgggattttaccatgttggccagactggtcttgaactcctgacctcaggtgatctgccctcctgagcctcccaaagtgctgggattacaggcatgacccaccgcacccagccatgagacccttttaacaattactaaagaccttgcaaggcatggctcacacctgtaatcctagcgctttgggtggacgaggcaggaagatttcttgacgccaggagttatagactccatctttacgaagaaaattgttttaattaaacagtaatttaattgtctactcagagaagtctagtccccataagattgtagcttatgcaaagcttaactgctttgttgcttttataatttctttttcttataagatatttaagtgttatcctattttgcttttaagacactttaaggctgttgaattatttaatctcttagggaattctttggtaacctcattgtatgtgatggaatctgacattttatattcttcctatctattcttaatattagcttatggttagattctggctatccctcagctcttatctagctctgggccacagcttcttaggtcattctaatgacggttttgacttttaaattttttcccaaatttttcttcattataaactactgatgaacgcacatatatgtatgtttagagaataatgacaaggaaaaagttttattttctttatttcctttttttttttttttttttgagacagggtctcactctgtcatctaggctagagtgcagtggcgtgatactgggtcactgcaacctccgccacccaggttcaagtgattctcctgcctcagcctcccaagtagctgggactacaggagcacaccgccataactggttaatttttgcatttttttgtagacctggagttttgccatgttggccaggctggtctcaaactcctgacttcgtgtgatccacctgcctcagcctcccaaagtgctgggattacaggcatgagccaccatcgcacgtggctggcttttaagtcttataagtctttataaaaaagacttttccctgtcattattctctgaacaatacaatataacagctatttacattgtattaagtattataagtaatctagagctgattttaggtaactggaggatgtgtataccttatatgcaaatactccaccattttatataagggacttgagcatctgcaaatttttctgtctgtgggaggtcttggaaccaatctcccactgataccgagggataactatatatataaaatamggaagactaaatatatatatgtttgaaaggaagactaaagttgttttgatttggggcgggaaagatagcgaacctcaagaatcaaccaaagaactgttaaaatctatttaaaaatttaactgctgttcaaattgtgggatacaagataaataagagtcagtggtgtttctgcagaccttataagaagagagctgacaaaaaggcacattgggaagatttttttccatgtcttttttttttttttttttttttgagacggagtctctctgtcgcccaagctggagtgcagtggcactatctcggttcactgcaagctctgcctcctgggttcacgccattctcctgcctcagcctctcgagtagctgggactacaggcacccaccaccacgcccggctaattttttaaatatttttagtagagacggggtttcaccgtgttcgccaggatggtctcgatctcctgacctcatgatccacccgccttggtctcccaaagtgctgggattacaggcgtgagccactgtgcctggcctccctgtcttttttatactgtctttgactgtataagtccttgtatgtgctctaagtttttcctagactcatttacaggtttaattttagtcaaaatctcaataggacttttctttttggaagactaggaaagagggaatgggaggtaacgaaaaaagtgacataactaatttacaatagtcgagaaacttttaaagaaagatcaggtacttgtcatattaatataaacaaacattataatgctactctaacaaaacagtatagttctgatagaccagtgaaataaagacagactctgatatgtgtaagaatttggtggcattgtaaatcagtggaaaaggaattattatttgatgaggtctcactcagttgcccaggctagagtgcagtagcgtgatcatggccccagtggattctcccacctcagcctaatgagtagctgggactaaggcacatgccacaatgcctggctaatattttgtatttttaaaaattattgttattttaaaaagagacaggatctcaccatgttgcccaggctggtctcaaactgctgagctcaagcaatctgttcacctcagcatcccaaagtgctgggaacacaggcgtgagccactgtgcctagacattttttatatttttttagtagagacagggcttcgccatgttgcccaggctggtctccacctcctggactcaagcagtccacctgcttcagtttcccaaagtgctggggttacagacctgagccactgcgcctggccaggaatgattatttaataagtggtactagaatcattggttatttggaggaaaaataaagttaaattttttcagatctatgctgaaataaattctagatgaattaaaattaaatagaagttaaataaagtagaaattataaaaagctagaagaaatctaggtaaatattttttaatgacctacaagaagaagtttataagcatagaaacagtgaaagaaatcacacaggaaaagcaggggggtcggagttgacaaattctataataagagcaaccataaatataattaagaggtaaatggaaatattggaaaacgattcccaacaaatatgacagagtatatgtgcgtgtgcatgtacactcacacagcctatttgggagcagggaagagactaccagtgcttttttttttttgagatggagtcttgctctgttgcccaggctagaatgcaatggtgtgatctcggctcactgcaacctccgcctcctgggttcaagtgattctcctgtctcgcctcccgagtagctgggattacaggcgcctgccactgtgcagggttctcctgcctcgcctccgaagtagctaggattacaggtgcccgccactgttcccggctaatttttgtatttttaatagagacggggttttaccatcttggccaggctggtctcgaactcctgacctcatgatctacctgtctgggcctcccagagtgctgggattacaggcgtgagccactgcgcccagcctaccagtgcttcttaaccattttagaataacgttttccagaaaaatgcttgtgctatttatgcacactaacaggcagacacaatgcacatacatatgcccacaactttcagtacaacttaggagactcacatattcattagagttttatagaccacaaaagaagtgcctggtaattgtgaataaacctcaacttccttactagtcaaataaatggaagatttttaaaaataataatatcaaatattgctgaaaatattgctaatggaatgcagattagtaaagcctccctagaaaagctgtttgactttttaaaaaatgtcagaatcttatctaaaagttctatttctgggacttaccttatgaagacatcagaatctcagacaaatttatatgtagcactgattattatgtaatgaaatgcttgtttttatggtagcaaaaaattggaagcaatctaaatgttcaactttagtttaatggttactataaattatggtttagccatgtaatagaatataatggaatcattaaatatttaaaaagactagtgatatgggaaaacatttacaatgtactgttaaaaaggaaataggatgttaagaaaaaatatttctaggtgatgggattattggtggttttaaatttctttatttttgcattcctcccctcacttgtttttatattgaatgtgtattagwtttataattaaaacacctttgtaaaaatgcaagttattctgttgtgtaatttttaaaagagttttacttaaaacctatgaaatgaccatgattgacaataatatatgcagattttggtatttttctgaaaacttaaattgttactggttcaaagaaatgttctctgaaaatgcatgttgaattaatactgaaacagttaatttttggataccttttcttcttctactagaaatagaagacttgttttcttcacttaaacatatccaacatactttggtagattmtcagagccaggaggatatttcactgcttttacaacttgttcaaaataaggatttccagaatgcatttaagatacacaatgccatcacagtacacatgaacaaggccagtcctccatttcctcttatctccaacgcacaagatcttgctcaagaggtatgtattctaaacatcttgttgatgtctacaaggtaattagtagtggcaggaaggcaggattattggaaaatactaatgtgactataagatttgtttgaattaattactgttaattacatgttaataatgtattgtgacagtttactacatgcattttatcctaaaaacaaaaaaagtttacttcagagtcagaacactgtttcatgaagagttaattttttatatataatcataaatttggatagtaacaaatatttgaattactagagagcaatttgttaatgtttttagtatagttttatgaattttaagcattatacattataaactgagatagtgaatactgatgagataattataactgataatcaggcattatataacgcctaagatttattatgtctaggtatttggaagttttcctcctataaaaactgtagacatttcaaattattaaatcttaatatactatgggagtttttattgttaacatgatgacttaaattcttgtttctgatgctaactggtgttcagtgtttgatctgttatgcaaacatcttttaaatttaagatttaaaaagggtataaataaactctcctgttttggggagtagacagtctctcattattctagcgttttaagttattttggtattattaaaatgaataattctggaatcccatcaagtgaatgtatttcattgaatgccaacatgagcagaaaatgggctattggggagggaggacatctagagctacagaacctataaaataggttagaaggtactttgtagattagcacataattgtccccaagggagatatttttctcacttgtcatatttacttatggtttaaatggttttctgaaatttcttaaaattacttttcttacggagattgaaataacattaccttgatcttatactattcacacatgtaggcaattctggactcacttccaggatagaaggaaaagacgagtaccaatatatttggtaaaaatatgacatatttgagaacacacaggcaagtgaactggtttcaaatccggttgggaagaatacaaaataaatcattataatcattcctgtcccttttaggaggaaggtttgtccagctggctactgggtccttgttttgctaaatacaacaatgggtgaagaagagagtgagagaagcaagacagatcacaattgctccaattgaaaaaagctgacacacacaatagaaaggtggaaagaagggagaaaagaaacaacttagcttaaagggttttaggagttgagaaaagcaaagaactaaagtggcttaaagagtaaatgccttgggaagaaataagttgttaaaaaggactttaaaaaagatcaattttgaatattagttttaggatagttcacatattcacatatgtgaatataggatagttcactattttaaaagtactgtataaaggagattttctgaaagtttgctttcacgtccttagagtaactatagtgtcttcagtgatagaacgtgaatggtttcccctggagtgtgcatgactgtgaagttgccctttcagtacattatacttgtgaaaaaagcacatagtcagaactcaacaaggagaggaatgttaaatctgataacaaaatcgtaaaggttaaatggacccattgcctttattttacagctggaaaaaaatatcagcaatcaccaatccaactcccctgtttcacattctgaatattgaggcctagtgaggttaagttaaaaaaaaaaactcaagaaatttagtgaaacattcagaagtattctttgtttacatggcttaaaatatcagttaaacattaggtatcatataataataaagcctayggaaacctcaaattttaaggtctagattaaatctttgatgatctagcatatttactaataaacacaaaccaaatttcttagatattatagtgcttttttttttttgagatggagtcttgcactgttgcccaggctggagtgcagtggcacgatctcagctcactgcaagctctgcctcctgggttcacgccattctcctgcctcagccttcggagtagctggggctacaggtgcccgccaccatacccagctaattttttgtacttttagtagagatggggtttcaccgtgttagccaggatggtcttgatctcctgacctcgtgatccacccacctcggcctcccaaagtgctgggattacaggcgtgagccactgcgcctggccctaggatattatagtgcttttataaagaaaatttagaacttggacttcattagatgaacttataaacacctttaagagagtaaaaatgaaagccaacgcgctgagaaatggtatttgattttgagatattgaagtgtgtgtgtgtgtgtgtgtgtgtgtgtaaatacatgacaaaaacttgtctatgaaatatataaagaactcttgttggctgggtgcggtctgtaataccagcactttgggaggctcacgcctgtaatcccagcattttgggaggccaaggcgggtggatcatttgaggtcaggagttcaagaccagcctggccaacatggtgaaacctggtctctactaaaaaaaaaatacaaaaattagctggctgtagtggtgtacacctgcaattccagctgcttgggaggctgaggcaggagaatcacttaaacccgggaggcaaaggttgcagtgagctgagattgcaccactgcattccagtctgggcgacggagtgagaccctgtctcaaaaaaaaaaaaactcttggaaattaataagaaaaaaagactactcggttaaaaaaaaattgacaacagtcacttcacaaaaaagaggaaatccaaatggccaatagcaatgaaaagataactaggcatcattagccaacagagaaatgcaaattaaaacataatgagatacagttacactgacaccagaatgacaatgattacaatttaaaagactgtcagtattgtttgtgaacttatggaacaactgaaactctcatacatcactggtggagtataaattgatactaccactttggaaaaatgtttggcagtatctgctaaagctaatgtacctatatactgtgacccagcaatttcacttgtaggtatatagccaagagaaatgaaaatgtgtccacagaaaagcttaaaaacagatgttcatagcaaccagataatagaaaccaaaaaaaacctagatgtttgtcaacctgtgaaagttgcattaggcttttgctgtggaggaacaatgagtaaacaattacagtctaatgagaagtgctatgatggcaatatgagaagagtgccaacagcaccgagatgtgcctaattctgttttgggaggatgggaaggatgaggggaatggtgagaagaaggaaaaaacatagaaggaaatttaatttgctgagtcttgaggggtgactgagaatataccaggaagcgtaagaaagaggaaaaggcattccatgctcaaagggtacagaggtggtagtgagagagaaagcctggcaaatttcttgaatgctaagtaagcataggacttaatgttaaaagatggtgtccagacgccggatgcagtggctcacgcctgtaatcccagcattttgggaggccaaggtgggcagatcacgaggtcaggagatcgagaccatcctggctaacatggtgaaatgctgtctctactaaaaatacaaaaaaattaggcgggtgtggtggtactcaggaggctgaggcaggagaatggcatgaacccggggaggcagagcttgcagtgagccaagatcgtgccactgcactccatccagcctgggcaacagagtgaaactctgtctcaaaaaaaaaaaaaaaaaaaaaaaaaaaagatggtgtctagatcctgaaggccattaataaatttaaatttatgctatgatggattactttggtaaatattttaaatattttaaaagaattaacttatatgaataggtgaaaggagaaaaccatatgatctttgttttgagacagagtcttgctctgtcacccaggctgctgtgcagtggcataattatggctcactgcaacctcaacctcctgggctcaagcagtcctcccacctcagcctcctgaatagctgggactcaaactcttgggctcaaacaatccttccatctcagcctcccagagtactgggattacaggcgtgagccacagcacctggcctcctatgatgattttgatgcagagaaggcatctgaaaaaaattcagtactttttctttgttgatacaaattcttagaaagccagtcacattattttaacttgataatagtcaaaaataataccacatgtgtgacaaagcactttgggggaaaaaaagaaaaataataataccagaaaccaatagcatcttccctaatggtgaaacacccacacattgccatttaagtcttgaataagataaagaaactccagatgcccaccattagtattcaacattttttggcagtaccagtcagtgcaataaaacaggaagaagtaatgaattatgaagttgtataggaacagggaaaatatgaattaatttatacagatgcacacacatatctcatttaaactgcatgtaagaggtaatggaagaattaataaactattaaaaaggctatctctgggtgttagataaataggtaattttactagttttttttgtgtttctcaaatttaacaggaaaaggtcacttcataaaacatttaaagcaagaaatttattctatacatgattgcgaatctactgaagaattttaaacagatttatataaacaggcttctaatttaaaatattactttgataacattgtggaaagtcagtggaaacagaataatgtggaggctattgtaattgtccagatgtaagattttgaatagcagttgtacatggattatagaaatatttaagtagaaaattaataggacatagtgtctatgtgggtaataaaggtaaaggagacatcaaggatgacttcctatcctctcttcctttcattgaattcattaaatatttcagtgctatttgtcagacattctgccaatagtcagatatgaagctgaataagatacaattctatcttcaytgagctcagtctagtggggaaatagccctattgataattttagatcaaatgttcagtcttatgagtacatattatctaggcaaatagaataaggcaattcaggtagctgagacagctagtataatcacagttgttgtggggagacagcatggtttrtgcagggaacaagcagtttaatgctgaatcaaaaaggttaaggcataaggaatgccaggagatagggctggaaaagacgaaagaatcagatggtgatggtccttagatttaatactaaggagcttagacttaatcttgtgacagagagccactcagaactagaatggtcatatttctgttttaaaaaggatatttagtgacatagaaaaataaaatattttagtaatttattagtatcaagtcaaaatagttatactgttactaggggccggaccacctgaggtcaggagttcgagactagtctggccaacatggtgaaaccctgtctctactaaaaataaaaaaaactagttgggtgtggtggcgggcacctgtaatcccagctactcaggagtctgaggcaggagaatcgcttgaacccgggaggcgaaggttgcagtgagccaagatcatgccattgcactccagcctgggcgacaagagtgaaactccgtctcaaaaaaaaaaaaaatactattataaaaactatgagtagcgtgatctcattttggtaaaaataaatgtcaagaataaagaaggggtatatacatagaaattttctcaaagtttagatgctatgagtacatttttggagtaactgactttattgagatataatttacatgcacttaaaatgagtgtgttttattgtatagttcagtgtattttgacatatatgtacatctgtaaaacatacaactgctatcaagttgtagaagcatccatcactccacagagcttctctcccacggccctttgcgatgacaatcacctctttcaatcctcaggccctatgaatatccactgatttgctttctgttttacaaatttgtcatttgtggacatttcatataaatgtaataagacaataggtggtcttttctgtcagacttcttttgcttagtataatgtttttgagattcatccatgttgttcttgtatcagtagtttgtaaattgctgagtatcatttcattctttgaatatcccacaatttgaccacttacctattgatggatatttgggttgtttcctgtttatgattctagcaggtaggtaatggtatcttgttttgatttgcatgtacatagtgactaatgatattgagcattattctatatgtgtattggctatttctctatcttttgtgaaatatccggttagatcttatttccattttaatcgtcttgagttgtaagagttcttaatatattctggctacaagttctttgtcagatacatatatcaaggtgaatattttggtaaaaacaagtagcgaaatgtaggaaggatatataccaaagtgattatccctaagtataataaaagtccattcttttacttccttccttttggttatcaattttctgatttttcacatttaacatacatcatttttataattaaaaaaataattagttttaaaatacaaaagggtcttgcctctgaaggaaaacaaggaaaagtggtatagctaaagaacagtacaaggtcaggaaaaggtatttttaaagataagggattagagyatttttataggccaatggaaaggagcagtagaataaaagaatagccttttaattccttaacaccgttgtagaagtagctgatgatatgtgttgacactagaataagcaacatataggttagtagggcagtgggtaaacacgggagtwctaaatttctttagaaggtaagatctcagagatgtttaggaactgacttaaaagtgggaatagggaraaaatctctaatacggaaaattattattgagctgactcagtgtattttgtatacccttggtacatttttaatccagaattatcttcccatcctcagagtttcttcagctgtcaaaaggtgtatgatcaagactacaaatttcatttaaaattaatgtagacttaataaactttaaaagggaaaataccctcttttaaaaacaacttttagttacccacagtcttaaatcctgggtcttaaagccttaaagccttgtccattgtaagattttagttgagttcttgaagaagataatatttgctgtgccgtcctgtttatacatatggaactctacaattagaaatataattttctaagtaccaaaacctgaggacagactggttttggtactgtcattgctttgatccacttgctgtggtaaaattaattaatcccaaaattatcatctcttgggtytcataggraaattactgataaaatgatttaaaatagccataaaaggtatagaattactgggttcctgtattatgaattacctttttttttttgagaaagtctcattccatcatccaggctggaatgcagtggcgccatctcagctcactgcaacctctacctcctgggttcaagccattctcatgcctcagcctcttgagtagctggaattacaggcacacgccaccacgcctggctaatttttgtatttttagtagagacagtattttgccatgttggccaggctggtctcgaactcctgacctcaagtgatctgcctgctttggcttcccaaagtgctgggattactggtgtgagccattgtatctggcctgttttaagattttcttaatcagtctttgaagcaccataaatagtaggtgccattctaaagataaggaaacaggctaaaaaaatttataaccaaggggagtttatcctaggaagacaaagatttctcgactgtgggaaatttaatgtaatccattatattatggtgattgttccattacactcatataaattcatcttgttagactgtcagtctttttttttaattatataaaaaaatttataaaatagagacagggtctcactgtgttgcccaggctggtctcaaactcctgggcttaagcaatccgcttgcctcagcctctcaaagtgctgggattacaggtgtgagccactgcacccagcctgactataactctttaagttgtcatctctgattttaaatagtcacataaatgatttaaaaactataaaatagcaaggtaactgttaggacagtttttcttttcttatgtaattattattaatgaattttatggtatgttgggtgaaacgttcaagatggaagtattttgtctataggcgtaagtaccaaaatattatttagtgtttttttaataagaaatactgttgttttatccataataacaagattgaaaactctaataattctttttagtgattttatttcttacaagtatttttattattttaatttgtacttaaaaaatatgaccctgcatacaggtgctactgatacttcctataatctaggaagaataatctttayttttgtttcttaggtacaaactgttttgaagccagttcatcataaggaaggacaagaactaactgctttgctgaatactccacatattcaggtagaaaatggacagaatactatatatgtggtttttccagcattcttctatttttttaaatcaaagactccagtactggaagagatgtcaaacattctctagcctattttgatgtttacaaccccatctataacatagtagttattgttggattatatattttcagatttaaaatgaaccaaattatttttgaaacaactttttctttaaaaattaggcaaaaattcttcccccctttggttgtattttctgtaagtttaattatctagggtgtgtagacctttacattgatgttatcttccgaagtttagtaagcattttagactttcataacccattccagagtatgcccttagtatacttaacacatctttattattagctctaattaattataacacttttaaagatttaatggtcagaatactatgtacataggttaaaaatcactctgcagaaataaatcatgctgttacttaaaatgccatggatttctttgaaacaggcacttttactggcccacgataaggttgctgagcaggaaatgcagctagagcccattacagatgagagagtttatgaaagtattggccagtatggaggagaaactgtaaaaatagttcgtatagaaaaggctcgtgatattccgttggtaagtgtcccacatactgtttttaaacaagtgcatttttctgctgttgtgtgcttcaaaagtctggttaatttcagaattctaatgaatagagtatttctgaagcagaaagtgtgsgggaaatggtcaacttttaaatctaattacaattactctagttgtgtaaataaattttttcttaagataactgaaggttagtattgttgaatrgaaaaaatagaatttaaaaataaatgcttaacaaaaattgtattatttttatttttaaattwtacatatatatatttttagggtgctacagttcgtaatgaaatggactctgtcatcattagccggatagtmaaagggggtgctgcagagaaaagtggtctgttgcatgaaggagatgaagttctagagattaatggcattgaaattcgggggaaagatgtcaatgaggtttttgacttgttggtaagttgacgcagctagaagaataattgatagcttttagaaagctcttattagactttagaataaaatatttttaaaataactgttaagagcactagatgatttctagcctgatttttccatgatgtaactgttccacagtatttgttagcagttttatttttgggtggtaccactgatatttttttactttctgatgtatcactatcacatatattttatttttctggaatcagtaatataactcattaattcactcagtacatatttattgagtgcctaatatgcactagccacttgggaaacagtaacaaaacaaagtctgtgtcctgatgattttttgtgttcttttattttattatctgtaattgattgttgttttcctaataatattagataataacagtgctatagatctgcagtgtccggcataataatcactagctgcatatagctatttctgtttaaattaagtaaaatttaaaattcagttccttattcgcactagctgcatttcaagtgctgagaagcagtatgtagctaatggctaccattattaagatacagaaatagcacatttccatcattggagaaagttctattggatagtgctagtataatcagaaaatcatttctagacatcttttgagtgcaatttatgatcactttgtacacacgcacagactagatttatggtcctagttattcagcatctgttattacagtggaatctgtactatctactgattctgttgtaaaatctagagacatcttcacacacttattttcatccagccccattcattgctttggtagagcaaagtgctgctggtcatttaagtctgtggaggggttctgaaatagtccagtttagggaatatagatcataaaatcatggaatgattttcataaatgcaaatttaaaaaataacctgatctttctattacagtctgatatgcatggtactttgacttttgtcctgattcccagtcaacagatcaagccgcctcctgccaaggaaacagtagtaagtgatttttaaatgttcattatttatgtgtttgtggatgctgtttacttctgttactgtttactgttacagaaatgtcactgtttcctgtactcaaataaattcaatcatttttatttaaataaatatgaaatatcaatgttttaaattagtaaactctgcacctttttttttggaaggtggaagatggaatctccatctgttgcccagggtagagtgcagtggtgtgatcttggctcactgcaacctatgccttccaggttcaaatgattctcccacctcagcctcttgagtagctgggattccaggcgcatgccaccacacccagctgatttttgtatttttggtagagacagggttttgccatgttggccaggctgatcttgaacgcctggcttcatgtgatctgcctgcctcggcctcccaaagtgctgggattacaggtgtgagccttcacatccagccaactctgcacctttttaaaataaaaagtagaaaataatttcagtttcagaattttttttatagttataggtgggtttacttaacttagtatggagtagggcaagtgctttttaaaaagtatgtgtaacccttcttttagagtatattgttctgttagacatttactcagctagatctgttaaaagtcagtctccattaccatacagtcaagcaattgcattccaaagtatatatccaaaaggactgaaaacatatattcacataagaatgtctacatgaatgttcatagcagcagcattcacagtagctagaaagtagtaacaacccaaatgtctgtcaggtgatgaatcaaagacaaaatatgtatgtatgatgggatattatttgataattttaaaagcctacagtactgatatatgctacaacatggatgaaccttgaagaaattatgctgagcgaaggaagccagtcacaaaaggccatatattggttcatttatataaaatgtccagaataggtaaatccataggagagaaagcagattagtaattccttagatgtggagatgaggatttatgagggaatggtgattactaatcagtaccaagtttctttttgagggcataagtatgttttaaaattgtttgtggtgataattgtacaaatctgtgaataaactaaaaccatccaattgtgtacatgagtgaattgtatatgaattatatatcaataaagctatttaaaaatgaaactttaaagtgttgaattaacatggaagcttgatgtattgcatctgttattcttaactttaaagcatagcagtttgagaaagaacacagtttcatttttctctcaatatttcatcacaggtatgctttatagtttggctatcattccatgttttcccttaattttttacagaacatacggaagttgatattgtatctgcaacctactttatgtttacagtttttttgcaggaagagaaatgaggaaatatagtttgtctttgaatttaaacagcttgattctctgtgcattgtgctgttccctgtatctcttctgtgtataagccctgaacttcaaaagtagctctgcaaactgaggaaacataacagaggagggttggaatatactcctacttacttatctacaataatccatccctcctgagtaaatgacttttgtcttttgagaataaatgtcagaagttaagacattttttttttttgaggtgggatctggctctattatccaggctggagtgcagtgatgtgatcacgactcctgcagccttgactgcctgggctcaagcagtcctcctacctcagcctccctagtagctggaaacacagatgcatactaccacatccggctaatttttttgtacttttggtagagatggctttcactatgttgcccaggctagtctcgaactcctgagctcaagtggtccacccgcctcggcctcccgaagtgttgggattacagacgtgagccacaatgcccagccaagacatgttttctcaacatttttttcctgctattcatgcagaatctggaattctgtaaaagaaaagccatttttttcatggatagaattaatcgaagtgttacattgaaacttgttgattctcgttgtatgcaaaacagaatatcaaagcaattaacttacacagattgtttcaacctaagaatgaaataacttacttatcctttagtggttatttaacccccaactttcattattgattaagaataaaaggctggtttaatctgaagaccaaaggaatataggttcatggtgaacaatctctggaactacttaactggaaaatgaagtagcttaaaaaggaagaaagtgggagaaagagcaaaatgccacatctatcccttttaaaatggagctttttctgttctttttacttggagtctcactcttgtcaccgaggcaagcagtggcaccatctgggctcactgcaacctccgcctcccagagtcaagcagttctcctgcttcagcctccctagtagctgagactacaagtgcatgccaccacatccagctaatttttgtatttttagcagagatggggtttcactatgttggccatgctggtctcgaactcctgacctcaggtgatctgcccgccttggcctcccaaagtgctgggattacaggcatgagccaccgaacccggcctattttcatatttaaagtagggatcttttcagaatagagtgatgtgcagtatttttcttttccttcttttctcttttgttttttgttttttttgagacagagtcttgctctgtcgcccaggctggagtacagtggtgcgatcttggctcactgtaacctctgcctcctgtgttcaagcattctcctgactcagcctcccaagtagctgggattacaggcgcccgccaccatgcctggctgaatttgtgtgtgtgtgtgtgtgtgtgtttgtgtatttttagtagagacagagtttcaccatgttggccaggctggtcttgaactcctgacctctgatgatccgcccaccttggcctcccaagtgctgggattacaggcatgagccaccatgcccagccccttcttttctctttttattatgaataactctcaattgcaatatatcttgccaagttttgtcagacctaactggcttaaaatgaactgctattattaaagctcattgaggctgtccagaaaggaaacagtaataggaaatcataatcttggttgacatatgcagaataattatctatggaattaataatctaaagaaattagaaccaatttattgagtatcattatggtacaggtcagcatctgttgatagcagcagcagcagatatcttcctgatttatgttttgtgatgttagaaatgtgtttaagacagatatacaaaataagtgttatctgaaacccctatataatgacttgttgaattatgatgtcatgtatggcaataataagctgtgtcagaagtgctctcttgagttcttaaatttcttttgtatcacacatagcaatcagtggctgctctttcagtagcagagggcaagagtcttggcacctctgtatttcacttcctgagtaactggcacatttgatctaggaaatgcatacattattcaaacgtacagtttccttctctcggcctttttaaaaaaaggaaggattggatttcccagactagtttgtaaaactttagattattctatactataataatatgtagggagggcataatagacttttatctgaatgggactttttcatttagtctaatgccataatctaacaaggagtgtatttaaatgaagaaggatcacatcgcttattagttacagaatatgtaccagaaaattaacagattattgattgtttaatamatataagctattattatgattatgtactctktgccaggcactacagagataactgtgttgtaaagaaaagttgagaaccactgctatcaaatacattgctttcccattataggtataaaaatgtattaataaagacatttatttcttggtggatgtggggaaaggagaaattctagtgttgtgtggagatacttaaaaacttgcttggtgctataaaggctttccttgactcactttcactattttctcttctacaatgaactttaagagttaaagataaatctgcgatagtaagagatacagaaataaaaattacaaagaaaaatattttggtagcagagatgtggaatcaacctaaatgcccatcgatgatagattcgataaagaaaatgtggtatatatacaccatggaatacgaatgcagccataaaaaaatgagatcatatcctttgcagggacatggatggagttggaggccattgtccttagcaaactaacacaggaacagaaaaccaaaaaccacatgttctcttacatgtgggagctaaatgatgagaacacgtggacacataaaggggaacaacacacactagggtctttcagagggtagagggcagggggagggagaggatcaggaaaagtaactaatgggtactaggcttaatacctgggtgatgaaataatctgtacaacaaacccccaacacacaagtttacctatgtaacaaacctgcagttggatccctgaacttaacagtttaaaaaaaaaaaaagtcagtgtaaaaagtataaaagccaacctaatacttagacaatagaaaagggaaaaaccaaacttccttttttttttttttcttttttttctctttgattttgagggcgtcaccaatgtgatagccttaccttcatgagtactaacctttccattaagctaatcccaaagttgtctcccaagtacactgtccaggtggttgtggcaaatttatacttttccaaaggagtgtccattgagcaagtggaatatagatcctgagttttagatcagcactctccaaatatttttttctttttcttttttttttttttttggagacagagtttcactctgttgtccaggctggagtgcaatggtgccatcttggctcactgcaacctccgcctcctgggttcaagtgattctcccgcctcagcctcccaagtagctgggattacagctaccctgtaccgtgtacaagtaccatctactgtgccaccagctaattttgttttatacctttatcaattaaaaaacattgaacatgtcccctcccatattgtatatatatgtactactctacttactatcccaaattacaatataggacaagttttattaataagtaattctaatagccttcttgattggttgaaaaacaatattttggaacattggatccctaaaaaacatgtaaataaactgatgaatcattatccctgtaccctatccccatttcatcattasgacttcaaatgtgaacagcttatagatattaaaaaaaggaaaaagaaaatgttgggctggaagataattgcgtccaaacagttctacaatttgaaatgtaaacagaagattttgttttgttcagaagccaaatactgttttgatcagatatactgttctgatattattatagcattatgaggccctggacctttcctatgagggtcagcttatctccttcattttaaaggggctttttttgttgtatgagaaacaaaataattttgacactagcaggaaagattggtggagataacttctagaactggtaagaattaatcagtggaatatatggataaaagtcatatagtatctgttaaggcaatacccagactttaactcattcaaatcattaatttttcagatgtgaaataaattttccttaggaaaaattaataagagccttttcctcttaattttaggaaagtaagagctttttctcttaattttagggtatattttagatgggactagagaaacttgtcacataagtaaagcatgttctcttcccagcctacacaaagaggggccctgttccaagccagttaaattagaatagttaagggatgagaactgcataggcaagagtacatggaaaagcatctctgggtgattttgttggcctatggcaatggtcataaatgtagatattccctcctcacgggtcttaatttctctcagggtagtagttccctaagattgctgtacctaataattacccaaggaacctgattaaaattcagagtctgagagtctgaggtgcggcatgagaattcatcattttaataaacatcctaggcaggtgatctgagcaaaaacactttgaaaaacaacatactgggtaggctttcagaaagtgatttgataaaattgtcaatcaagattgacaagtactttgatttgatctttgaaaaatctggtaaaattgatctctccactacaagtgatgccaaaaattccatttttagattctcaaggttttttttttttggcaaaaaagtaacaaacagattctagaagtattattgataggatggtgctcaagcacttttttttttttaaagaaaacatatttctagataaaactacataggagatttttcctcatgccaagattataaatttgtataatctttttgctcaatctcttaactgtgttttgattcactgctatcccacacaactttctaaaattcatttttagtgctgactgagaaagatttcaagattttaataaaaactgttttttcacatctagaatgaggttctttagggcactttgcatttaggatgagccacaacactttcaaatttggtgtgttatcttaactatatttggtacaagattatatactatgctattccatgtatatgaattaatatacaggggaaaataatcagtgtttctagaaatcaggatgatgtttatccttggaggggatgggatgggtagtgatggaaagagaccaggtggggcctctgaggtgttggtgatatgatggttgttgatttggatgctagttatacaggtctgtttagttagtgaaaattcactatgctatacacttatgataatgtgtattttttgtgtatcaaaagttactcccaaaaggcataataacatttaagttttgctggtagctgtttaacttttatatctttgtatttttaaccagatcattttttaaccttagtttcagtttgtatattaggactcagctttatttcctatttatagaagttaataaaatattctttgaaattaaaaaatattctttaatgacaagccaaaaattttttaaaaagccatttatctgtctatctatctatctatgtctatctttgtcacttagcattttttccaatttcatatagtctgtcatcgacagtactcattttagtcagtgtctcaagtgcttaaagagcgcttaaaaagtgccccttttggggtagactggtattacttttattacatataacctcaattatggtgagagtaaaacacttaaagctaaggccaggcgtggtggctcgtgtctgtaatcccagcactttgggaggccaaggcaggtggatcacctgaggtcaggagttcaagaccagtgtggccaactggcgaaatcctgtttctactaaacatacaaaaattagctgggcgttgtggtgagtgcctgtaatcccagctactcgggaggctcagacaggagaatcacttgaacccgggagatggagtttgcagtgagccaagattgtgccactgaactccagcctgggcaacagagcgagactccgtctcaaaaaaaaaaaaaaaaaaaagccaaagccaaataatatttggatagaaatggaccttgaattcttagactgtttgtcttttgcttggttcgttgagcctgaacttggaatttaacctatgtgtgacagaaatgctcactgcaaatatgtgggcagaaatgctcattacaaatttgtgtgagatctcattagatgaagtagatttcttatagattttggaagtgtcacatgcaacttgcccaggttaggtaaaaattagacatggggaaattaaagagaattttaattcctttataacttcttagaagtaagaatagtctgtcatatcttacagaggcatattggaagaaatggcatacagaatagcttataaagttcatgagagttactacctgcccttaatgctaagtagaatagcacaattctttgatttattctgatttccaaaaacacattattagcaaaaattataacttgtaccgttaataatatgtcaaagcctacatagcatacaaataagaattgattataaacttgatttagttaattttagtcgttgatagtgtgcttgtttcatgaacatatcctttaaaagaaacgccaagagagtttaaggcatagttggactgacagtggggtcaagagacaatgacagccccagggaagctcatatttacctgcttagatgaagagatgtggtaaggtaaagtgtaccttttctagtagctgtggtttggaaattgcataccttattgcagagtcattgttttcacaggtcaggattctattctatttctgcttctctcaagcttttgaggcaccttgtacctcagcttgtagctgcgaacagtgttgtggatatccttgtacatatctgcaagtcaacagagaagataacagatcagcctgaaaaaatattgcccaaaaacactgttacttaacacccttcttccaactacaatttctttgcactgatgaaaaattgtggccaagtgcagtggctcacacctataatcccaccactttgggaggctgagggagaaggatcgcttgaggctagaaatttgagattatcctggacaacatactgagatgctgtctctattaaatttttttaaaattaaaaaataataaaaaatttgtagcatttaaattgtattcatatgaaacattttatattgccatttattgttgtttttgccctttttatcttttagatccatgtaaaagctcattttgactatgacccctcagatgacccttatgttccatgtcgagagttaggtctgtcttttcaaaaaggtgatatacttcatgtgatcagtcaagaagatccaaactggtggcaggcctacagggaaggggacgaagataatcaacctctagccgggcttgttccaggtaagacacaatatggtagaaagtacataatattaaaagaayattgaaaatgcaagccttcacaaagaaaaactcactytttcatgcctctatttaataaagtattccagttactttttcgtgtagttgggtttttatgttgtacctgcagcrtaagtatattaaatagaatgtggccaattctttggcctttagaatggaattatgtataacttcagccaatcccatattgtagtacatttcctgtatacatattaagatgaccgtattatcgaggcaatacaacttgtattatactrtatactatatactatgacattaattggagcatcaacatgatttttgagaaggaaagatgcataactttataaggagtcaggaaaagtaacatcatagaatttattgtaccaaacgtgatcttagggcagaaayaggatgctccaaattttttattgatgaaactatccctaacttagactaaactaaaactttagcttacattatagattaagattattaaggggacatgtttctgagagttaagatgatacaaaatagaacaaagtacagtcatgcatcacttaacgacagggataagttctgagaaatgtgccattaggtgatttcattgttgtgcaaacatcactgagtgtatttacacaaacctagatgatatagcctgctgtacagctaggctatgtggtatagcctattcctccaaccaccatcatatatatggttggttgttgactgaaatgttgttatgcagtgcatgactgtatgtagatataattattttctacaaatggctcttacagttcccaggatggcagtagaataaagaaaggagagcagaactaagggaagtttaataagctatcggagaaggcaaaggaatacatacaggatgataaaaatagggatatagagtaaagggataataattcatccatttatttgttaataaatgctgttatgtctgcaccatgtaaagcactttgcctggtgctgagataaacttcgcttacatactttacttgaaagcatatccattaacacttatgtatatttttttcttctgtgtcccctactttataatattttcatgatattgtctctgttataattctttctactgtatatgctcagtttataaacttcttgatgtcagaggccaagtcttatttgttttaaatccagataatatatgttaaattaatgaataaaagatgattttaaaagttctcagaaaacaaacaaaaattaaaaaaaaaaaaaatagttctgccagaactgctgtttctgaattagacctttcaatgctttgctgtaatgtttttctggccttatcttttatctacaaccttttttagcgatcatccctcctactcacaccagaagattttaagcataacagatttggctatagacttagccttacactggatttgacaacaagcaatagtttaggggaaaagaagaaaaggagggcatgaaaaaaaagactgagaaatattgactatgagatacatagtaggaacagaggaagttgtccaaagattttagaataagttataaggaatctcttttatctctgtaactaagccaaagagacttttctgggtacaagagatttcaacataatatttacatttattctttttgagtataaggtcacagaaagcttcaaatttctcactttaaaactcagaggctagaaacagattttgtctatatcagtcatattttaaggaaggaggaatggacttcttacatttattttagagtatgatgctaaaacccgtgattcttcagagtaacagttacaggacatttctctagaatcttggagtgttgggtagccattgtggttctgcctcaggcttgtgccaaatatcagtatggtgtcttcctaccatgccgaactttagcccataaatgtttagaactagtgtttgttgatagattgattttctgaaagtatatagattccaatgatgacatttctaagtctttttataagactaaagatctgccttagagtttgacgatggctttccatcagaattagacagatttttttaagaggtcattatgaggctggccctggtggctcacacctgtaatcccagcactttgggaggctgaggtgggaggattgcttgagcccaggagtttgagactagcctgggccacatagtggcatagctgacataatgagactttgtctctacaaaaaatttaaaaattagctgggcatggtggtgcgtacctgtagtcccagctattcaggaggctgaggtggaaggattgcatgaggctggaaggttgaggctgcagtgagctttgatcacaccagtgtaacagagcagtctcagaaaaagaaagaaaatcatttccatctctcattaatttctgcctctatttcagaatagcctatagttcatactacaaaaagtgccacagaagtacatcattgtaatgttttacatttttaatatgtaaatgattaaaattactttgttcttgatttttaaaaatcggttacttatttttaattttttttttttttttttttttttttgagacaaaatctcgctctgtctcccaggctggagtgcagtggcatgatctcagctcactgcaagctccgcctcccgggctcatgcccttcttctctctcagtctgctgagcagctgggactacaggtgcccaccaccacgcccagctgatgttttgtatttttagtagagatgggtttcaccgtgttagccaggatggtcttgatctcctgacctcgtgatctgcccaccttggcctctcaaagtgttgggatyacaggcataagccactgcacccgacccctttaaattttaatactcttaaaattttccttctagtaatagtwacttgtactaagaawacagtcttggccgtgcacagtggctcatgcccctaatcctggcactttgggaggccaagcaggaggatcacctgagattaggagtttaagaccagcctggccaacatggtgaaaccgagcctctactaaaaawacaaccattagctgggcatggtggcgggcccctgtaatcccagctgctcgggaggctgaggcatgcgaatcccttgaacctggaaggcggaggttgcggtgagccaagattgcgcmactgcactccagcctgggtgacagagcgagacttcgtctcaaaagataaccaggcttcctttaatgcttcttatgtgtatggaagtcagtattaatctttttgttagtacacttacgaaatgcactaagttctacagattatccccacctatgtagaatttgcttattgatttttaagaatctctggctttacactgaaaaaaagtagatttaaaaataaaataaaaaagtggaacctcaacgtaattcagaatcttctaagtgaagccacttgtatcctataggaaaagacatatttgatttaaagtagaagtcggaaaagaaaacctctttcaaggtcaggaaccttgaaagcctcctatattaaaatattaattttrtaaggaaaagcacgttttccatttatataattggtaacttaagggtggaaataaaaaatggctaacacatatacatacacaaaagaagaggaattgagaataatgcatgcaagggaatatactgaatggtttcttggaattgaatatggaattgaatatgtgatgaatgcgcacatgttgttttggaaaagttaattcctagaattgatatccttaatttgagataattctaaaggacctagaaccattgtaagatccaggatagtacttttccacaaagtaaatgctcaatgaaaccttttaaaaagttgaactattaaatttttaaatattttagtagatgatatgtattctaataatacatatgggattgattgagcagagttaatattttaaaaatttggaggcttacacatcatagctgacattactcctgtgttggcaaaaggatttggaagggaatataagtgaagagatatgtctagtgttttcccttcttgattaaaaaaaaaattcttatccttttatcttaaatattttacccttctttttctttctgctattaagggaaaagctttcagcagcaaagggaagccatgaaacaaaccatagaagaagataaggagccagaaaaatcaggttagacacttgtatttgacataagtaaatggtttcttgggtcttcatctggagccatgtgtgaatctgcatattagaaccgtgaagaagtactcagggaaagagtgatacaagaggcaaaactgattatctcagaactgtaaagaaaggataagatttaagtattaaagattatctgtctatactgtgtagttaattgaaaattgtaaatgctttcctgaaaaatagtctttatacaaacagtgtaataagtatttataaaagtaaattaaaaacaagctgggtgtggtggtttgcacctgtaatcccagcactttgggagactgaggcgggaggatcacttgaggccaggagttcaagacaagcgtggccaacatatggagayctcgtttctgcaaaaaaatttaaagaataaatgaatgaataaatagagttcttcaatttgagttaygtggttttgttcacgggaacacatttatagttatgtttatgattgctcaacaggaaaactgtggtgtgcaaagaagaataaaaagaagaggaaaaaggttttatataatgccaataaaaatgatggtaagttctactctcagggataggtggaattatatctgaaaggagtctaaacctagtcctgttttgcaccttaatgttaaatatgtgcttgagaaaatcatttagtagaaagtattttcttttggaatcctgtgagtaaggcagtgttttgaattctggggaaaactgatacaaaaattcaagtactatttagcatatgtagtattaaattgacagtttcctgtagtttttttctacttaaactctttgcaaaaattatacttctaacaaattcttacagaacatacttgaagtaaaaactatgtcctctacaatagctcatgtcacagaagcaactcattcctgagaacccactacctgctggctaagtcagacacacaagagaattttagttttattttgattgattgctaagattaaaaagctcgaaagttgtagcttctcttaaaatcaaaagctctgataatgttgggctagtattcctaggtgacarcagtctgctggacctgagtgatgactgttgctcttatatcaagcacctggtgtctagtttaacagtctctaccactcccagtgttttattaacccaacctgatttactgattttattacctccttagtttgtttttatgggcatttgagtttgctacttctgtttggttcacattagaagcaacccaaataataaagcaaaggctttccttcttatgtaatttataaggcttttctgtcaagaatttgaaatatttgggagcagcacacattaaactaataaagataaaacattatagatcattataatattccataaaagctaaatgaggtttgatcaactttaataaatttttttctaaaataaatatcctttaatgctaattgacagattatgtaactaaaaagatttaatgagttttaaattttatcctctatatttgtgattaatatctcttttattttttgaaacagactgaagttaactagtccagctctaagagctactgtactgtagaaaacgtggcaaatctgaaccttatggatatacacactgagtctataaattaaaatgctaccagtcttgattatacgtgttagaataaactcagatttttcagakaaaatcattttgagaggagaaggaattacatttgctgtttatgatgatgtcatcatcatgaatatttttaaataaataactacaattcataataactgctgtattccagggcagtaactatatgatgttgttctcacaaactccttgaggttacagagtaatagattcaagtttagatattaggccgggcgcggtgggtcatgcctgtaatcccagcactttgggaggccgaggcaggcggatcacgaggtcaggagatggagaccatcctggctaacatggtgaaactccatctctactaaaaaatacaaaaaattagccaggcgtgatggcgggtgcctgtagtcccagctattcgggaggctgaggcaggagaatggcgtgaacccgggaggcggagcttgcagtgagccgagatcgcgccactgcactccagcctgggcgacagagcgagactccgtctcaaaaaaaaaaaaaaagtttagatattaaagtgatttgctgaaattcttaacaactaatacatgattggttgagctggaatttaaacaagtgtagtttgagctcctgctctgtgccaggctctgtgctgagcattgacaagcctaagatggtcccctaacctcatggaaatagagctgagggagtctgacttcacatctgatgctccttcacagtcaggagaagtaatatgagtgaggacttggcaggctactagttatctgcttttgttcttaccacttgacagctctggtttcatctggattatgggctttaggaatgttaccccacctgtcataatttatacctcattttgattcatgactctgggttagcattccagagtagagtaaacataaatgcagaaagtggagatagcatgcatatggcctgttttcaagttatacaactacagcaggggtatccaatcttgtggtttccctgggccacattagaagaagaatagtctggggccacacgtaaaatacacttaacactagagatagctgatgagctaaaaaaaaaaaaaaaaaaattgcaaaacaatctcacagtgttttaagaaagtttacaaattcgcattgggccccattcaaagccgtcctgggctgcatgcagctcatgggccacgggttggacgagcttgaactataggaaagtattccagctttctctgataacactggttgtagccactatatgtaaatgtcggtctatgctagccattgtattcagcgtatacattatgtctgrttcttaaaacaaccttcttaagtagaatattaatatctgcattcttcaaaaatgacggatattactcttactagttcattccctggtaccgcatccttattcaaagtattgactgcaaattagctgtttaatgtaagaatcagtataattatattgtattagacattcaagcatgaattttttatttcaaatatgaaatgagataaaaattaatagaaggagtattatattgttgtctgattcattttcatgataccctagcaaggatgtaatgacaataaattgtgcttttgtctaattttgggtgaagatctatgagtatttatatctttaatacatggccataattttgtttgaagrgcttaacttttttttcccaaagattatgacaacgaggagatcttaacctatgaggaaatgtcactttatcatcagccagcaaataggaagagacctatcatcttgattggtccacagaactgtggccagaatgaattgcgtcagaggctcatgaacaaagaaaaggaccgctttgcatctgcagttcctcgtaagtttgaatgcattcccattttcctgtgcttttcaatttaccagctcagaacctaactatatcatgtagggaaattttttattcatttcattaaaacactgttgtcagtgaaagaggaactttaaccaaagattttgacaatttttaaattaaaaatagtcattattaagaaatttaaatttgtccttcragtatgtactgawtattttctaaacaaatttcagtttgggccccttataatttcctgttccatagagaatcagttcctgctgctttaaagtgatacagaagatagaaacttaggcataatctgaaacagaagttataagattatatggtacctaatcttatggagataaactttaggagaagatgagtagtagtgttttaaatgcaggatgaagtaacttgaagtgtaagcataaaatgtattgagataaatataactattactaagatactacaaactcatttttgttcatttttcaatctacaaaaaataaaaacaatgttaaacatgtaggcacttagcattttctcagtttattattttataatctgtgttacaaaatagaaattctttctgactagcagaattatcccctgtcctcactctaagccatgcctgttatttctatctgattttgtttgcctagatacaacccggagtaggcgagaccaagaagtagccggtagagattaccactttgtttcgcggcaagcattcgaggcagacatagcagctggaaagttcattgagcatggtgaatttgagaagaatttgtatggaactagcatagattctgtacggcaagtgatcaactctggcaaaatatgtcttttaagtcttcgtacacaggtaaagctagaactttgttttagggtttgaacttagaaggaatgtcatatagagtaatctagtggaagctatattttggtccaagaacagcgcgacctaattaagttctcatacggtttttcccactgatttgctatctgaaatcacacaggttgctaaatctctttcagtttcctcagagggaaaacatatacatacttacatatacaggttgactatctcttattcaaaatgcttgagaccagagtgttttgaatttcagaatttctcagattttagaatatttgcatatatataatgagctatcttgaggatagacccaagtctgaaattaaattcatttatcttttatatacaccttatttacttagcctgaaggtaattttatttttcctggggatattgaataaactgtctgctcctgtattttgactatgacccgtcacatgaggccagggtaacgttttccacttgtgctgtcatgtcactgctcagaaagtttcagattttgcatttcagatttttggattagagatgttctgcttgtatatatgcttgtatgtatgttctgaaacttaaaatacagtaaatatagtattggtagtactttaatttgagtctatgaaataatttcccttttctgattccgatatgagaaaaattagaaaatttcaagattatttttatggtttaaatgccattgttcaaatattaacaagtatcacagtgaatgcttggttgtatgaaaataatgagacctcagtttcacttatttggcagactaagcaaaagtgtaaaattactaactagtgcctcttagctttctatttaaaatgataattttaggacgccaatgtgggtggatcacttgagttcaggagttccagaccagcctgggcaacacggcaaagccccatctctaccaaaaattaaaaaaaattagccaggtgtggtggcatgcacctgtggtcccagctgcttgggaggctggggtgggaaaatcgcctgagccagggaggcggagattgcagtgagctgcactgcactccaacctgggtgacagagtgagcagagtgagactctgtctgaaaaacaaaaacaaaaaaacctaattttagaaacttggagtttttaagaaactccaaatgttacggaaaattgtttaatttttgtagaccatacagctttagcatacgactttccttaatgtggtagaatctgctgctcatgtcaaattaggcaacatagtcagtggtcattaaagagatgtacataaaggagaattgactctaaaatggctattctaaaatagtaattagggatttttgtttgtgttttagtggacaaatgcacttaggctctactatttcaattataaatttttgatttaagagaagtatacatgtttttactaaatttctttagagttctttatattatttgggcaaacaggtttttaaaattcttatttctccagaaaaaagggctaacagattttaacaaagaactcagcatattgttttaatcatcttaatgtttttagatagcaatggcatattcctataatctccattttgatagagcgtgtcagtttgagcacacacagtcatgcattggtaatcaagtgaaaactgcaatctccagattcaaacatagtctactttttcttggatgtgcttttcttgaattgtcttgcacatgtgaagttatgttctatgattttgcttatatttagtgtctggcacatagtaaggcaacttgtatgattctaattgctccaaaattgatttttaatatggttattgtaatctgtatgtgatcttattattaaaactaggtgttttaatatcacatagttgtcatccttcagtatcattcacttacatttcattacataaaagagcaagctaaaattatatgtatataatatgtattatatgtgtatatatatacatatatacacatatatacacktgtgtgtgtgtgtgtgtgtgtgtgtatatatatatatggcttcacagtatattcttacagtgaatggtaggatcttaaaaatattgtgaattgggccaggtgcagtggctcatgcctgtaatcccagcactttgggagagaccaaggcaggagcattgcttgaggccaggagttcaagaccagcctggacaacaaagcgagatcctgtctctacaaaaaagtaaaaagttagctgaacatggtggtgcatgcctatagtcctagctactggggatgctgagatgaggggccacttgagtgcagcagattgaggttgcagagagctgtgatcacaccactgcactctagcctaggcaacagagcaagtcccttaatcwwatatatatatatatatatatatcagtattattaggaagtaattaaatgatgcaaattattttaaaaatcaaaatgtctctttacagtcattgaagactctccggaattcagatttgaaaccatatattatcttcattgcacccccttcacaagaaagacttcgggcattattggccaaagaaggcaagaatccaaaggtaaagttttcacactattgtactattccattgaaggtaaacatgaaacagtcctggtctaatttgtcctggtgcttaaaagctacattagcttgagctttcaaactgattattttttctgtaatattacttgcccaaaaattgccatggttgccactgggttggactatggcagctttccaaagttggggcatctacatttggtaacctttgagcgtcttcacatgggtctgtgacatttctagggagatgtgactgccaccaaagttatcagccaactcttcaggattactgacttttctctgtagatactccacattttcagggagccaaatttgagtgctcttgcttttctcttctttttatcccactgaaactttatgttctgctttttttctccctttggtcttctcacatggtttggaacagaaaaatttttttaaattattttagatctatgctagatatggttgaggtagtccatgtcatattaaacattaatawttgactgataacatgttattaataagacagcattgactttttatttaaatatgtaagatggtaactctgtcaggtgacttactgtatcagagtaacatgttcttccttgttttttttgctccatatttattaaatagatctacttttgagagggctcactcagattgcctcatttcattgactatgcctttaaatctccttaaagatagtcattaaaagcatatttacactcctttcttttgattgttttttttgttgttgttgttgttttggtcgttgctgttttgaaatagggtcttactctattgcccaggctggagtgtagtggcatgttcatggctcactgcaggcgcagactctgggcccacgtgatcctctcaccccagcctgtccaagtggctgggactatagccatgcaccaccatgcctggctaattttttatgtattttatagagacagggtctcgctatgttgccaggttggtattgaactcctggcctcaagaaaccctccttcctgcctcagcctcccaaagttcttggattgcaggtgtaagctaccacgcccagccttcctttcatttttttttttttttttttttttttgagactgagtcttgctctgtcacccaggctggagtgcagtagcgcaatctcggctgactgcaagctccgcctcccaggttcacgccattctcctgcctcagcctccctagcagctgggactacaggtgcccaccatcatgcctggctaatttttttgtatttttagtagagacaggatttcaccatgttagccaggatggtcttgatctcctgaccttgtgatccacccgccttggcctcccaaagtgctgggattacaggcgtgagccaccaggcccagcctcctttcattcttgactgtccaccacaacacattaacccttcctcttcctcttcaccctccaaaatatcttttttcactctatgtctacttaacatttcttaatctatatgtgaggttaagaaatgatatatatatatcatcctacatgatgagcataattctggttgctttgtctaggctaagtaggctagctggttaaagtagtgctgcacccctttttcatttccgccatatacctacaaattcttaagtaactggggtcagagtatttgttgtccatagcacttgggatgatacaaaggaaataggcagcatggtcactggctgttcttgaggaggatcacaatataacaagagaaacgagattaatactgtgtaaaatttagtgtccaataactactttggtagaacagaaactccatggttgttcaaggaaaaggatgcgcactaaggaccagagtgtactccatgcttcctgttcagcctaattttccacttcctaacatgcacacttatttctttttaggctatctttttttccaacaaggatttgctatcatatgaagggccatagaccattccaaaacatgttaaacatgttaagcatctttttttttttttgagacagagtcttactctgtcgcccaggctggaatgcagtggcgtaatcttggctcactgcaacctccgcctcctgggttcgagctattcttctgcctcagcctcccgagtagctgggattacaggcacctgccaccacacccggctcttttctttttttttttttttttttgtatttttagtagagactgggtttcaccgtgttagccaggatggtctcgatctcgtgacctcgtgatccagcctcctcggcctcccaaagtamtgggatwamaggcgtgagccaccgtgcccggccagcatctttcttttggttggtctctggccgtgttctaatggaatttttatctacttcactttgaattggccatcctaaaatttcaatttaggtctgattttttttttttttttttttttttttttttttttttttgagaggagattctatatgtcacccagactagagtgctgtggcatgatcatagccttgaactcctggagtcaagtgaccctcccgtctcagtataggcatgtgccacaggtcctagcttatacatatttttaaagcaggaagttgatcagtaccaaaatgttttaacaatatgcaatatatttgattttctaattagaactttctgattcttttactttgctgaagtatattttacctacaatacatgcattttagttgtataattcagcaagttttggaaatgtgtacctgtgtaaccaccatgccaatcaagatttagaacatttctatcactctagatagttttcttatgcccctttgaagttaatacccctccattctttctttctggcaaccactaatctgctttctgtcactatagatttgtttgatctgttctagaagttcatataaatagaagcatgccgtttgttaaagtttgtgtctggcttttgatcaacatgtttttgagattgatctgtgttgcatctaacagcagttcattccctcttaatgctgagtaatatactatgatattaatataccacaatttatccattcttcagttaaaaaatatttggataaaattttgagggccgggcacagtggctcacgcctgtaatcccagcactttgggaggccgaggcgggcagatcacttgaggtgaggagtttgagaccagcctggctaacatagtgaaaccccgtctctactaaaaatacaaaagttagccgggtgtggtggcatgcacctgtaatcccagctacttgggaggctgaggccggagaatcacttgaacccgggaggtggaggttgcagtgaaccgggattgcgccactgcactcctgcctgggcaacagagtaagactctcaaaaaaaaagaaaaaattttttttgagctagtatgactgaagctgctctaaacattcataaagtctttttgtagacctatgttttcatttctcttggataaacacctaggagtagaattgccggatcaagtgaggtaaatgtatgttttaattgtataaaaaactgctaaactgtttttagtttactaaattgatataaaaggcggggtacagtggctcacacctgtaatcccagcattttcagaggccaaggaggacggatcactttttttttttccggggtgtggggggaaggttttaaatgtatttttattttatttttttatttttttattatactttaagttctagggtacatgtgcacaacatgcaggtttgttacgtatgtatacatgtgccatgttggtgtgctgcacccgttaactcgtcatttacattaggtatatctcctaatgctatccctcccctctccccccaccccacaacaggccccagtgtgtgatgttccccaccctgtgtcctggtgttctcattgttcagttcccacttatgagtgagaacatgcagtgtttggttttctgtccttgtgatagttttctcagaatgatggtttccagcttcatccatgtccctacaaaagacatgaactcatcctttttttggctgcatagtattccatggtgtatatgtgccacattttcttaatccagtctatcattgatttgggttggttccaagtctttgctatcgtaaatagtgctgcagtcaatgtacgtgtgcatgtgtctttatagcagcatgatttataatcctttgggtatatacccagtaatgggatggctgggtcaaatggtatttctagttctagatccttgaggaatcaccacactgtcttccacaatggttgaactagtttacggtcccaccaacagtgtaaaagtgttcctatttctccacatcctctccagcacctgttgtttccgactttttaatgatcgccattctaactggtgtgagatggtatctcattgtggttttgatttgcatttctctgatggccagtgatgatgagcattttttcatgtgtctgttggctgcatgaatgtcttcttttgagaagtgtctgttcatatcctttgcccactttttgatgggattgtttgattttttcttggaaatttgtttaagttctttgtagattctggatattagccctttgtcagatgggtagatggtaaaaattttctcccattctgtaggttgcctattcactctgatggtagtttcttttgctgtgcagaagctctttaattagatcccatttgtcaattttgagttttgttgccattgcttttggtgttttagtcatgaagtccttgcccatgcctatgtcctgaatggtattgcctaggttttcttctagggtttttctggttttaggtctaacatttaagtctttaatccatcttgaattaacttttgtataaggtgtaaggaagggatccagtttcagctttctacatatggctagccagttttcccagcaccatttattaaatagggcatcctttccccatttcttctttttgtcaggtttgtcaaagatcagatgrttgtagatgtgtggtaytatttctgagggctctgttctgttccattggtctrtatctctgttttggtaccagtagcatgctgttttggttactgtagccttgtagtatagtttgaagttggatagggtgatgccttcagctttattcttttggcttagggttgtcttggcaatgcaggctcttttttggttccatatgaactttaaagtagttttttccaattctgtgaagaaagtcattggtagcttgatggggatggcattgaatctataaattaccttgggcagtatggccattttcacaatattgattcttcccatccatgagcatggaatgttcttccatttgtttggtcctcttttacttggttgagcagtggtttgtagttctccttgaagaggtccttcacatcccttgtaagttggattcctaggtattttattctctttgtagcaattgtgaatgggagttcactcatgatttggctctctctttgtctgttattgatgtataggaatgcttgtgatttctgcacattgattttgtatcctgagactttgctgaagttgcttatcagcttaaggagattttgggctgagacgatggagttttctacatgtacaatcatgtcatctgcaaacagggataattcgacttcctcttttcctaattgaataccctttatttctttctcctgcctgattgccctggccagaacttccaacactgtgttgaataggagtggtgagagagggcatccctgtcttgcgccagttttcaaagggaatgcttccagtttttgtccattcagtatgatattggctgtgggtttgtcataaatagctcttattattttgagatacggcggacgcatcacttgaggccaggagttcgagaccagcctgggcaacatagtgaaatcctgtctctactaaaaatacaaaaaacattagccaggcatggtggtgcacgcctgtggtactggctactgaagaggccgagttcgtgctactgcactccagcctgggcaacacagcaagacttggtctcaaaaataaataaataaataaataaataaataaataaataaataaatagatatagaaactaagaagatgatggtgttactcactggatgcaaaatgtaaccaaccagttatgtaattgtactctgaatctgttcttctagtattgtgaaagaatggtattggcataaagatgtgatttttttcttgtatgtattgttaaagtcacagaaaatcatctatattgtggtaagagagaatatatgccagacaaatgctctgctgtctgtcagaaagaggaataaagacacaatctggaaccaggaaataaataataataataatwattattattattattatcaaaaggaataatcagacactttagcaaaagaaataagttggagggcatttgtctttattgtctcttttctatttaattcatttctttttatgctttctttgactataatttgcacttgctttagtttctcaagatgaatgcttaatttttaaactcttcttttcaaatgtaggcatttgaaattataaatttccctcgaaacagttctttagttgcatcccgtaagttttggcattgtatttttgttaccattttgttagaagtattttctaatttcccttcattttttttttttttttttttgagayggggtttcgctcttgttgcccaggctggagtgcagtggcactatctctgctcactgcaacctctgcctcccgggttcaagcaattctcttgcctcagcctcccgagtagctgggattataggcatgcaccaccacgcccagctaattttgtatttttagtagagatggggtttctccatgttggtcaggctggtcccaaactcccgacctcaggtgatccacctgcctcagccttccaaagtgctgggattatgggcctgagcccccggcaccccgcttccttgtttttctctttaacacatgagttatttagaagtatgttatatagtttccacctatttggagatgtgaaaaagattttaactgatttataattccaggtggtcagaccctgaaagatgtcagtcttttcaaatttgttgagccttattttatggcccaacatctgttctttcttggtgaatgttctgtgcacacctgttaggatgtgtattccacagtttttggtgtagaggatggtgtatctgattgtatttattctacttaagtttttttctcctgtgatatttctttcttttttttgagacagagtctcactctgtcgcccaggctggagtgcagtggcacaatcttggttcactgcaacctctgcttcctgggtttaagtgattctcatgcctcagcctcccaagtagctgggattacagatgtgcaccatcacgcctggctattttttgtatttttaatagagacggggttttgccctgttggccaggctggtctcaagctcccggccccatgtgatycacctaccttggcctcccaaagtgctgagattacaggcgggggagcccctgcgctggtattggtatttctaatagtgctttattactcaatgatagaagtgctgaagtaaaacagattttcaattttaactctataaaattgtgctaagaaaatgatggcgttacaaaatgtaaccaaccggttatctagttgcattctgaatctctgaatctgttctgctagtatgaaggcttgagagtggctatctagcagtatgaacttattgtcagttttgcctagttcagctaaaaattttgagctaaaacattttgtttcatcttagtcgtggattgtaatttgaaagagaacttcagacatgaagtactaaataagtgatataagccattttggcacaaaatggaataacaatgccttaaatttgataaaaactaggtggattcgggctttatcattttcatttcaactccaataccacaaagtttcagttctctgtggagtcctagaatgttcttccaataatcttgagcttacggtagacataagttttagcaaaaatgtcagtgtgttcagttacagtggtgaagtagattccctgctgggaacaaaggattctgtgtgccatattcagatgtacaacattccagaatgagagtcatgcaagaaactgcctcaggacaagccagagttgtcatatttttaatatgttttcttactgttacagaagttcaaacagttgaatgatataaattgttttgtactatgggtccaatatagtattgatgtgtgacttttatatctgagacattttgtcttgagtttaagttagttgtcttcattggcaggggtgatttgaggtgagtttcactttcttgaacccatgtgcctgataattagagggttcaggataagttttgcacakagccttgctgcctgcttatctttgtaaaatggccctttccttcagtcagtattttaaagtaggctactctatatagtttcccaaactctggtaggatacttttaactctctgcagcagatagtatagggcaagggctctttactagagccaaaagtaaatggcattttaggtccttgctccaaccagaaaggttcactccatattacagatgttactattaggaagaggttatagtgtctagaatgtttgaaaacaaatgtttgtagggaaacagtgtgtgttcttgaagcttgtagttttgttggtgagataagacaaaatatgtgaaaacctaaatagtggtataaaacaggatatattgagtcccagatggttcataatatgagtcgtgaagatgccaaagcaaaggtaaccattgtggccgtgacagggttggaaaggagctcctgaggttgggagagacagaaggaaagctatgaaggtcgctccttgttctttggccatctctgactcatcctatattatttggttaggaaaggaattatctcacagtttttatcttctgtttgcagcctgaagagttgagagaaatcattgagaagacaagagagatggagcagaacaatggccactactttgatacggcaattgtgaattccgatcttgataaagcctatcaggaattgcttaggttaattaacaaacttgatactgaacctcagtgggtaccatccacttggctgaggtgaaagaaacatccattctgtggcatgttggacttgatctggcaaaaactgccaataggaggactgcccgacactgcagcaagattgaggataagatggaaggcagcagtataagctgtagatctgttcttagatctcttgaattagtgagacgacagttcccttaggcagtttgtgcatggcatcctttattctctatacatggctttagcggttcttgcctcattttgggattctaaatggaagctttcaacagagcattccattttgtcctgttaaaaccttttgttttcacctaaaccctttctgcttagttgtatctctgtgaaaaacttgtatacacaagcgtccatgtctcacacaaatattgatgtgattattcttaagtgttaaatcattaacacttaaatgacttcattgggaatattgagcagagggactgtgcttctatgcactgggcaaggcagtatttgcttaggaaactaatktagtcatcagagatactttcctaaaaaggaaaaataaaaaacaaaatggtgccactttgggttgaagctactttgttaggctygaattcatttatatgtcttttgattcttaaaaaaacaaaaaacattccattagaagcaccagtttttttgctcaractttgtggatcagactctacactcaacacactctaatctacttaaaggtatacaaaatatgctgatcttttttaaattatgatttcctgaatttttttcttaagtcgtctcaactgatttactcacttagcttcccttccctcatcagcatagtataatagaatgtatgttacatttttatgaatggcaggtgttcattataatctgtattgacktaaaaagtttcttcctcatgatgctaatagttttttgtatacatgggaggatagcacatttgacagtttttgcatttttatgtatgagcacagtatcctatgactgtgctacgtatatataggtaataaactggaattctgttgatgaatatagctgctgtactgtatattaatatttaatagatcaacaaatggtcattgaaaacacttgtttagcattagaataaaattatatatgtccttgggaaatattatgacagttgactttaagatcaaaaggaarggaagacctgaaagtcatttgaacattttaggaaaagaatattggagagaaaaaggtattaaatatatagaaataggtttttaacctaacaaggtctgcctcttatgacgagaatgcaacagcttggtaaatcataaaagaaacatttaagctaataggattttcgtactgtctctatagctgtagctttaaaattcaacgtatataattggcatggaaacttaatttgcagtcttttcaagcctttaggatagtgtgatgtgtaacaaacaacctcaaatgtgaatgccttgattttatttttatggtgactttagctacagcatttcctatacccagagctaaacactggaataatactgacatcatttaatttaacataagcaattatgtttaaggagtaatttgtgtcatgtacatatttrattgattttttttcttctacataattttatttgaacaaatgtagacagtttatatgtcgcctttttctgttcaaatttgcatggcctattaagttggctggagagtgttttatgtggaaatattttcaagataatgttccttaggaagaaaataacattcttgggttgagggaaggaatgccatacactactgtctcttcagatctgaaatactccagtttagagccaggaaatttcacaggtcacaccgatttttagcattaaaaactaaggaatatacttagcacttacttaatcttttcagttttccagtttacgtctcaggaatgaagtgtagtctatggttgacaatggagttttgtgatcctgcttattgtaactgacaactgttttcaactccaagagctaaactattggcagttcatgttaagttagagtgagggtgtaggtagtgtcagtgagtggctcttgtgccygctgtagacattaggcctgcactagggccatgtgctgtcaagattcaggaacatggctttaacaagcagatcttgtatcaaggcagaggtgatgccatgccatacttttaggaagtctgagatgataaatatttcaaggtcagtgaagtctatcaatcattctccccttcctcatcagcaatggtagatagaaatgtcctaaacttttctaaatcctagtgatgaggatgtgctgatattcaacatagtccttaaagtgaaaactgagttgttgctgacctccacaaaagaatatggaaaaaagccttgctgtacacctagttgtacagccactctggccaattccatttcctgtccctctgtggttctgactggagaccccagtgtgggggaggtcttaccatttaatatagaaatgatatcaataactaatgctatgtacttggaaaatccaaataaggaagttttaggttggtgcataactttgtttctcaaattttcgttgtcagaacaaatggaaggagaatattatttagactaatccagatttgctttctatgaaaatctaatgtctggattatcttccttttctcatggcctaagaaataaggatcaataaggaatgatttgaatgtaattttgtgaatgtgtggaaaatataaagcagggatttagccttaataaaggtaaccttctgacatctgttgttaatccccctttgtactcttttcctgtatctgcactgttattttgagatgtcatactgtacactgtattgtaaaaataaaaagtaaaattatatttcaaattttaaaagccactaagcaatttctcttgctatttgctcggccactcaaggtttccacacatgtaaagaccaccctcctcttcaagtttttgccaaaagcaagaccattggatcctccagctacaacacaaaatactttttgatttgttctttacagagggatagtgccccctgttggcacaggtataggtaggtcctgtttccttaattattaaaaccaacaactaagtgtattaaagatggacaacgcaaggctgtgaacttgaaagttttctggagaaggaggtatgtaataatactcaggcaaatggaccttatgtgcagcctgggatctgaggacactgaggcagcatgtgaattattggcaaatatataacatattttgtttctccagtcttcatttctcctttttttctgctgtacatctcccaaaggtcataaatcatacaccaacaaacaaaaagtttcttacatatatacacctgtcaccacagttcagctttccattcctattcctgatctatattcttctcctatgtttcagataactgactccacacaacaaattatgtgtccattgttttcttgatttctttttaacaaatgctaaactataaagtcatctgcacttttgtaagtattttaacaaggccaatacattccaggtatttaagaagccacaggagaaatctagggtcctttggcttgttgctttacattgaatttacctacatgtggaaaaccactaatctggatccctacttcaaactaatttttgcctcctagaaaggcagtacgtaattcttaaaatataaagatcaaattaaatcaaatcatacttgacttgcattccagctgtgctctttgacttgtcaaagtctcaatttcctcatctgcaaagtggagatggtagaatttacagttcagcaggctgttgggaagacgaaatgttaaacagttacctatttttaaagtacttgtgaactgagttgttggttttccagtcattactgaatttacactgaacctaagattttattctgtgagcagcaaccagatttcctaaatatcagcttctccagaacagtcccaatgtctttaaatacccaaagtttgaaatatagatgaaacagaaaggaaaagttagggtgtaaaaattctgaaggtagactgcttagacttaaattctggatttgctactttctagctttttaacttaagactactcaagtttcctgtgtctccaatttttcctctgtaaaatagggggttaaaataatatgtgcctcttatggttgttgtaatgaagtaatataaacaaaatacttaataccagtgcctggcacataactaagacctgctatcttataggagatgttaaatgcttgcaaaatcatttagtactttaaaactgcctagactggctgggcatggtggcttatgcctgtaatcccagcactttgggaggccgaggcaggcagattacttgaggtcaggagttcaagaccagcctggccaacatggtgaaaccccatctccactaaaaatataaacattagccgggcatggtggcgcaaacctgtaatcccagctactcgggagactgaagcaggagaatctcttgaattgaggaggcggacgttgcagtgaactgatgttgctgccactgcactctagcctgggctacagaatgagtgagactctgtttcaaaaaaaaaaaaaagaaagaaaaactacctggactgtgatgtcacttgattaaaatacagtattaataaagacagtgtcacaatttcagwactaaacattattccatggctaatcatgtcaaaaatgcctggaaatggatgcgagaaagactgagtccccatggatggctcatgccaaatcaaacagtactaaaaacctcagacacctgatgtggccactcaaatgcttcatcttcatatatgaaagcaagtttttatcacttataaatagtaaaaagttaccttatttcttactctaaaataggaactagttattttcttaattagcaaataaggaagtattataatgccctcataactcatcggcaatcatttattagtaccccaaaatgcaacagttgtctcaaaagtaagcctttttgtaaaactctaatacatggagtgggaaaaatagctacccacttcctacatgtctgcagagaaagctctggctgacactactgatctgagcatgagaacatgacttaacagtaaattaataaaaacggaatgacttacttttaaatcattttactgtttataccacagtcgcatttaaattggcagaatggctcccatgacagacaagacaggaacctgtcatgcaaggaaaagtgcaggttttcacaaagtttgagaagtaccatggtaacaagaatggctgcagcaatctcagacaacagcgccaaggtttgcaagtgggtaggaatgaaagctgctccacagtaattggcctgagaccgctaatgcttcctaagaggtatttcctaatatgcttggtaagcagatcacgtgtaacacagatgtaaatggagtatgataacgcttctgcaaagtaaattctgtaagttcctgggcaggttttacagatctctttcatccatgataaatggttgctaaattatgattctgcaaaagtaatcccataaatagacatctaggtaaattttacaaccagtgaaattcttaggccaaaaaatmaatagccacacaaatcaaacctacacactgtgaattaaaatgaagccagtgttagggtttctcaaagaaccagaacaggaaagattattcaaatagaagatcctcgtccttctcttcagccagaagattagcaggctccaacacctctccagctgctctcctttgctccaagtccttctcagatttttcctttagaatctttttcttctcttgtattttctttaacctgtaaaatacaggtgggggtggattttttaaacactgtttcaatattaagtagatttgatttctttgagttttgtaacaaggataataaacacatacctagaaaaaaacctggtacttttattaatttcattttcagtaatttatttataatcctttttaaaaaacataattttaagctaaaaatacataattttaagctaataactgatttaacctgagacagaagcctttttttttttttttttttgagatggagtcttgctctgtcgcccagggtggagtgcagtggcgcacgcaatcttggctcactacaacctccacctttgcgttcaagcaattccttgcctcagcctcccgagtagctgggaatacaggcgcatgctgccacacctggctaattttttgtatttttagtagagacggagggtttcaccatcttggccaggctggtcttgaactcctgaccttgtgatccacccgccttggcctcccaaagtgctgggattacaggcatgagccaccgagcccagcctagaagcctttattaggttaaattttgaaatccattctcgaatggaacagattttgagcattcaggcatttttttaaaattttggctcaacacaaccctgagtatcatggaaggacagaaactaacctttgataattaagattatagaccatagttagatgctaactccaggtctaagaccccccatgcctttcctaaatactcctgccctcacctacctcccatttctctgaaccgagtatacagatccctgtacactaccagtttagtatttatacctgttgactctaaatgttcataaccaattcatggacatgcataatttctctccaagtgctgtgctaattctctaatggcgtgatttatatactatttggtaatgcctccaggtgctttataccttctcctgaacatgaaatacatatttgttgaataacagctgaattctagtttcttctctcagtttttatgtaggaggcacccaatctaaatcatcatttcattttaaagaataatcaagggccaggcacggtggctcatgcgtgtaatcccagcactttggcaggccaaggcaggtggattgcttgaggtcaggagttttgagaccagcctggccaacatggtgaaacaccatctctactaaaagtacaaaaaaattatccaggcatggtgacacatgagccaagatcgaaccattgcactccagcctgggtgacagagcaagactctgtctcacaaaaaaaaaaaaaaaaaaaagaataattcagtcttggcttgtccaaaggtaatgagttctctctattacgcacaatcagttacagatcaaactccttgttctactctttccccacttttcactactgcatttgactatcttaaaacatatatttaaaaaaaaaatcaaacctaaacagtttctctgaaaggcctaagtttttggaaatgccatgttataggtacatgtaaaatttgacagatttgtttccacaacttctggtaataatatttcttgctgcttatttatcagaataaaacataagctgtgctaattctaaagaacataaaccaacaagtcattcagcaaatacagcctttggaatatggaaaacaaaagatgatcaataactgccaatttcaacaaacctatagaactcttctcgctctctctcatccagctctgtgatgatataagcaagagtacgttcaatccggggaatgatgactagaataaaaaaaaaaataatatgtgtgagaacttcaaaccccttttttcaaattatcagtgctcatttgtataacagttattttttcctaattgtaaaattaatgtgcatttaatgcagagaacttggaaaataaaaacacaaagaagctcttcctctccccctccccctctccctctccccacggtctccctctgatgccgagccgaagctggactgtactgctgccatctcagctcactgcaacctccctgcctgattctcctgcctcagcctgccgagtgcctgcgattgcaggcgcgtgccgccacgcctgactggttttcgtatttttttggtggagacggggtttcgctgtgttggccaggctggtctccagctcctaactgcgagtgatccgccagcctcggcctcccgaggtgccgggattgcagatggagtctcgttcactcagtgctcaatggtgcccaggctggagtgcagtggcgtgatctcggctcgctacaacctccacctcccagccgcctgccttggcctcccaaagtgccgagattgcagcctctgcccagccgccacccggtctgggaagtgaggagcctctctgcctggccgcccatcgtctgggatgtgaggagcccctctgcctggctgcccagtctggaaagtgaggagcgtctgtgactggccgccatcccatctaggaagtgaggagcgtctctgcccggccgcccatcgtctgagatgtggggagcgcctctgccccaccgccccttctgggaggtgaggagcgtctctgcccggccaccccgtctgagaagtgaggagaccctccacccggcagccgccccatctgagaagtgaggagcccctccgcccggcagccgccccgtctgggaagtgaggagcgtctccgcccagcagccaccccgtccaggagggaggttggggggtcagcccccggcccggccagccgccccgtccgggagggaggtggggggggtcagccccccgcctggccagccgccccgtccgggagggaggtgggggggtcagcccccgccaggccagccaccctgtccgggaggtgaggggcgcctctgcccggccacccctattgggaagtgaggagcccctctgcccggccaccaccccgtctgggaggtgtacccaacagctcactgagaacaggccatgatgacaatggcggttttgtggaatagaaaagggggaaaggtggggaaaagatagagaaatcggatggttgctgtgtctgtgtagaaagaagtagacatgggagacttttcattttgttctgtactaagaaaaattcttctgctttgggatcctgttgatctatgaccttacccccaaccctgtgctctctgaaacatgtgctgtgtccactcagggttaaatggattaagggcggtgcaagatgtgctttgttaaacagatgcttgaaggcagcatgctcgttaagagtcatcaccactccctaatctcaagtacccacggacacaaacactgcggaagtctgcagggt

SEQ ID NO: 95001 - DNA, 68243 bp, Homo sapiens
  misc_feature (1)...(68243): n = A,T,C or G
ataaaatggagataaaaatggcttcagctccagagaattgtgagaattaagatgattcctctgtttcagctcgggagccggaggttgcagtgagccgatatcgcaccattgcactccagcctgggcaacaagagtgaaactccatctcaaaaaaaaagatgattcctcctaaaatgtttagtgggtcaggaacaaagtcagccctcaataaatatggctttaaatgtttcgatttttaattaggagattagaaagaaagatttcatttgtttgcagtgccctgcaatggctggctgtgtccccggtgtgttttggtgaagttgcttctattcccattcagcaattctcagataaaccaacaatgtgttttgtaccgcagcagcccctcattccccagcatgaccctggtgaagtgtccattaattccttatctccaggctgaggatggcagccacgaaggtcctgcttctattttacagttaggtgaggcacaaagagttgctgagatgtcctcagattgcggagcaaagtagtggctgagcaagaactcactcacagctctgcatgtaggaccccaccccagacctctggcctcttcctgtcagcgaaagtagtggctttgaggaggggaggtcaaggagcatgaagaggccctccaaagtccagttgccctgtactgagccacctactcctccacgctctccctctcctacagtggcccactgtggacactcggcaagcacatgatgaatgtatgaacacaggacctctcgtagttcagctctgagatgggctggtggggactcagatagattggagtgtgagggtgaggtagggctgggagactttcctttctcttggcttgggtctgtcttctgctgaggagataataataacaaccagcatctactgagtacttactgagtgccaagaactgagctaggtgccaaagctggaatttgaactctggaagttgaaccccactgtcagcatgaaaacccattgtctacagcggccacacatgtgtcccagaaaagtaaagggtcactggcagctctctgacaggcctgggtttccttggcttcttggagccctagtctctccccacacaggctccctgggctgttggagaacctgccacctacttaaagctggtccctgcccagttcctccctcccccaattgatgtgagcagccattgttctcatctttgatgaaagctgttggagaaataagacagctgctttaaaactaggatgttgcaaactctaaaatgatctagaattgcagtcagatggctggatttacctgatcctcattccctgagctccaccagctcccaactcaggtgctctttctccctccctctcctgtccctatcccattaagcccccattcacctggctctctcttgcccgtataacccgcagctgcagcggacagagcattttgcattgatatgtgttgtaattacatcagttccgccctggcagttgctctctgagaaaaatcactcaagggcataccagtcaatacagaccccagacaggtgcgtgacaatgcagactcctgggcccactgatctgaatagctagaggtggcctggaatctgtattttcagatcagcattttaagacatgaggttagatttggaatcactgcccacctcctcattggaatccttctccaccaggccctccttccatgctgctcctcctgggtactttccagctccctagtctttgggcgccttgctagtcctttacacctctacaccttcaagttccctcctcatttcataatatttactagattccaataatatgccaggcactgaggcaggccctttatctccatctttataataactctctaaggaaggaattctgattcctgatttacaaacgaggaacaccttccctcccctccccatccgctgcctggctctctctggctcccatacccacaggtatactgaacagattatttgcagtgaatgtatgtggtaactgcattacttccaccctgtgtcccctgggtggaagagccaggattcaaggacaggcatgtctagttctaaagcctgtgcccagagttgataggtcacacttgccacactttccttcctagcacagtggctggaaaatagcaagtattcaatagatatttgttagtgagtaactgaatgaataaatgaaagaagagtccatacttaaagttaggacacttcctcccatctttccatacccatctcacatgcacacatatacacgctcacacacacactgaggatttagccactgggccatttcctttccttcctaactggcccttctctgcatgtccaatcactgccttcctagccccacttagatggtgactcttgacactctgctctaacccatggttacctcacctctcatgtcccatggtggctaatcctgacaatcaccgaagagccaaattgctcccaaagattcagcagtagaagtaacctcctgacttctttgtgacccaaggcagagagcagaagcctggactaggactggccccaagtttcctgggagtctgaaactcccttctccttcttctcccctctcttccccttccaacagtaactgagaaccaggtcctgaaggcaggaggaggggatcccttgatttgaggcttttttggtgatataggagagggtctctttggagctcagagaaagcaggtagggatgggaagcagggtttctagaaggctcgtacaagggaagatgaattgtcaaccatttcaccagctctcctagagttattcctgtctctcaagccatctgcttatccattgcaatcttgtaaacagagatttacaagatctctcgtaaactccagccaatatttgttcaaagaataaataacaaaagcttccatttatagatcacttgctgcatgccagacaacatactatctcatttaatcatttcaacaaccctaagaggccagaattattatcatcattattttacaaacatggaattaattcagaaaccttaagcaactgccccaaggtcccaccaccacttaagtgataaagcttaaactgagctctggccagttccaagttcccctttccctcccatagtgctgtccaaggaacaaggcccagactaagatgctgtaatattgactctgtaggaatttattttttaaacattccagcctaaaccatgtggtgtgtgtatataaagtgactctcctgtaactcctagagtggttagttagcatctgaagtgccctaatcaggaatccgcactccagaaaatggttacataagcacttcaaacaacatcaaaatatacacccaagggcttaatgtgcttgagggatgctagaaataatcttttattggtgaaataagcagttttcaaaacatggagttggccaggaagattatttgcccttgcatgaatggagtgtgagagccagagcaggccaactgccccattttcttgaagcaggctgtgtgactgttttgtgccagcttgccaatacatgtatatttggcagaatttggccttaactatttttaatatcccacctgcaggagattacagaaaagaagacgaatggcctcctctcacctctcacgtcccatggcagctaatacaatcattgaaggactaaattggctcagaccagttgacaagtccccatcccggcctcatcttctttcacaagaatgccctagcatatccttcaactcaggcacatgatggcttttcttcccatctctctgttccatcctccattctcctttgtcaggtcacttgtaataataagctaatatccaaagaaaggggctctaggggtgatggtgggtattatagtcccagctacctgggaggctgaggcagaaggactgcttgagcctaggagttctgggctgcaatgagctatgattgccactgcattctagcttaggcaacagagcaagatcttatctcttaaaagaaaacaacaacaacaacaaaagttgtaacttgcccaagtcacatagataaaaagtggaagagacataactgaaactcaagcctcctaaattcctaatgtaggggtcagtccacctctaccaccctcccacagactgccaaggggtcctgctcagagttgggcaatggtgagatgcactctatggccccaaactcattgaaactaacaactgagctgaaaaaaatgtggagtctcttctgccctctacagaagtaaccagctataggggagagcatgctcctcccattccactctccatggtgcgtctcttttcactatataacaaagttatattaaatgagttctgggctgaggtgcggtggctcatccctgtaatcccagcactttgggaggccgaggcaggaggatttcttgagtccaggagtttgagaccccacctctactaaaaaaaaaaaaaaatttttttttttttttttgctgggtatagtagcatgtgcctatagtcccagctgttcatgaggctgagatgggaggattgcttgagcccaggagttcaagttacagtgagctatgattgtgccactgcaatccagcctggagaacagaacaagaagaacctatgtccaaaaaaaaaaaaaaaaaaaaagtgaatgaatgaattaatgtcttcttagcaaaatccagagaacgtgtttttgggcttccttatgcaacttctggaatgttgaagtggatagcctgagcattgtcccacaaaatggggctaatctatcccaatccccacgagctataaagctgtttgcaagttcagccattgaagtcccattggcccagttaaattctcacgtttggcctcctgcactaccagctttccttagtgtctgggctctcaaaacttctacgtgagaatggcctggggtactttagttagagattcagattcaaacccagggtgggggtgttcttcatggtgcctgggatgagtcttccaaggaccatttggagaaacaggcgctgatggtattttgcttctgttcagtccttcactgacagagagcctgcagggttgaggaagaaggctctgttttgaagtgtggatccctccctgcaatggtctctatttgcatcttctttactccaggctcacctagccaaatgttgagttttccaacccctctgggtatgagattgctttgggcgatctgagatctgcaaatgtctgagaacgaggagcacatgggcacgctgatgactgccctgcaaactgcctggcagccagggtcctcctgggccctcctttaaaataacatatacataagccggcctggaggcccaggcgggaagatcacttgagctccggagttcgagtccagcctgggcaacatagcgagaccagaaaataagcaagtaagttactctctgggctgtcgtaacttattttttctttttctcctgcaaattgcaactcagaacatttggtctgccagactgaaatatggacttctgttccaaatatccagacgttacagttcccacaggtggccaggagaatgctggaacctttggcggagacggtctggtcttgtcccgcagcccgcgagggtcccccgctatttggggtcaagcagatccccggggcgctctggccaccccttgcggcagctggtgcggcctcctcggagagctccgggccggcgcccgggacaccccgccgccctccctgccgccccagggacgagcccagcggtgcggagaagtgggaggctggagcctgctgaggtcatttcctgtgcctctccgcgagctgcctggagagctgagcccagcgctctgcctttaaggagcgggcggggagccgaggggaggagggcgcccggcggagcgttgaatggggcgcagcaaggctcggccgggctttgtgcagcgagcccgcgggcacccctcccgctccagcctcgccccgccccgcagcccacgacccctgctgccggggaggggagaaccggcggcagcccgggactccggcgagagcgacgcaaggtcggctgcggcggcggcccgagggcgcccgtgtgcccagtgcgcggcggggacggccgcgagctcgctggaggtgagcgacccgcgctcccgccgctgtggtgggctggggctgcgccgcggcggagggcgtcaggctgcgcgcgggggacggcccctcgggcccagaggacgatccggagcaggtgcctccctacctggaagcgagctcccagcggcggggagcgctggagcgcgggtctggcttgggaagccgggcgccccaggggactcgcgccgcgaggccaggaggagcctcccccgggagtacctggacttggggatcggtcagatccagccgctcctgggaagggccctcggagcggacgtgcaggctgccaccttgctatcggtgctygctccctttcaccccttcccgcacccctccccatctcacctcaggttatttcttctgtgatttctgagtgttgtctttgggaccctatggctcaggctcgactcctaggagcaggtcattcaagcagaaaagaaaacaggttgggcgccgaatgacacagagcattgtgtcctaggagtcttagcgaggactcggtcaccaggaaccaggggccttagtgggggtggcagaggcggtgaagagcctcatctggaaggaaactcctctccttgtgggatttctgcttgccaggatatctcctccatagcttttactatgaatccacctcataaaactcttccaagacagagccttggttcaggtaaaacacttgaaagaccatttaaaaaattcagtgggagaattatcagttccttcatcaaactgtttggactgtcttctatgtgacagacactgtgtatagggctagtaccatcactgaacgctttatagaacatcggtattagtgtttctgcatattattggccccatttttccaaaggaggaagctgggactctgaaaagttgtgatttaggccagttgcagtggcttatgcctgtaatcccagcactttgggaagccaaggcaggaggagagcttgatgccaggagttcaagaccagcctgggcaacatagggagaccctgtgtctacaaataaataaaaatttaaaaattagctgggtgtggtggtgtgggcctgtagtcccagctaacttgggaggctgatgatcctgtctgttaaaaaaaaaattgttgtgatatgcccatggtcacatagctaaaaagtggaagagccataactgaaacccaagcctcctaaattcctaacgtatggttcagtccacttctaccaccttcccatagactgctgagggggcctgctcagagttgggcaattgtggggtgcagcctgtggccccaaactcattgaaactaacaactaagctgaaaaaatgtggagcctcttctgccctcttcagaagtcaccagctgtaggggagagcatgttcctcccattcctgatagaaaaaaaaaaatccaaagaaatgtctggcaatttaaagtgtacatcatttacccctaaattccattttctgggactttatccttcagatatactctgatgtatatgaaatggtgtacatcattgaatattcattgcagcattgtttagcaaaaggttggaaacaatctagatgtccatcaataaggaacccttcaataagatcatgtaaaagccacacgataggatacattaaagctgttataaagcgtgcagagaaaatgtggcagatatataytttgatgtaggaatatctctaagttatattgttgagtacagtgtgtatggtgggccacgatttttgggtgggtgtgtgaatgccacatacatatgaatgcctgtagatgctctgaatatctctgagagaacacacagaaacctgtaacagtggttgccgctggggagaactatggctgaagtacaggcatgggaagaagccttactttgcactatatacccttttgttcaatgttctaaaataactttaaaaatcatatgacctcctctccagatctccagagttagatctggtagtgagcacatctttttttttttttttttttttttttttgagccagagtctcgctctgttgcccaggctggagtgcagtggtgcaatctcagctcactacaacctccgcctccagggttcaagcagttcacctgccttagcctcccaagtggctgggattaacaggcatgcgccaccacacctggctaatttttgtatttttagtagagacagggtttcaccatgttggccagtctggttgaactcctgacctcaggtaagccgcctgcctccacctcccaaagtgctgggattacaggcttgagccacygtgcccagcctcgtgagcacatctttgggccacatctccttttatgttctagatgctattggtttgcctttgtttgctgattacaacaataacagtcatttattgagtacttagtgtgcaccaggcttttgtaatatctcctttaattctcaaaaagccctgcatgatgtgatatatgaaatggccattttgaaggttggaaaatggttaaatgacggtttcatatggttcaaccaaatattattgtcctgattttcaaatattactgccctcaatttcagaatggaactgagtctcaaagaagttaagcaaatggcttaaggccacaggattatttagtgcctgagctcgtattcaaacccaggcctgtcagtgccagagcatgggatcttaggtactaagctgtttctctttgctgtttttgttctcaaggaatgttgtacctggttgtcctgaccacttcttttggtattgaggttcctgcggcctaggacatgctcaccttctctgtctccccggacattgtgtggaatgtcatgtaggcacccagcagtggccaaatggatgttgttagcttgatcagatgacagtgctgagatcagaggaagttgtccctgtgtacactcacacccttctcccagcctcatccccagaaacgggacacaaagctgtttctctcccacaattgacaagtagtcagccacgtctggcagagcacttttagaagatggtggtagcccctcactagcaagtggaagtcatacagatactcacactcagggaatgaaccatactgaggcaacatgagagagcccagtggaaactgtgcatataacagaagccccgttgccttccaatgcctcctgcatcctccacaagatagaggcaatgagctattttgaggcctgtggtgacctctgacctctttcttttagggtcctgtattgattagctacctttgtagggagctaccaggatattcaggctgtagacttgagcctcaaaagccacaatatctttattcatctttatatccccaatcttgcacacaggactcacttaaaagttgtttgtattaaacttaatcttggggtcgggagtggtggctcacgcctgtaatcccagcactttgggaggccaaggcaggtggatcacctgaggtcaggagtttgaccagactggccaacatggtgaaaccctgtctctactagaaatacaaaaattagccagtgtggtggcatccgcctgtaatccccrctactcaggaggctgaggcaggaaaattgtttgaacctgagaggcggaggttgcagtgagccgagattgcaccattgtactccagcctgggtgacagagcgagactccatctcaataataataataataaaataaaaacttaatcttaggctgggtgtagtggctcaacacactttagaagaatgaggcaggtagatcacttgagcccaggagttcgagaccagcctgggcaccatggtgaaaccctgtctttacaaaaaatacaaaaattagccagtgtggtggcatccacctgtaatcccagctactcaggaggctgaggcaggagaattatttgaacccgggaggcggaggttgcagagagccgagattgcaccattgtactccagcctgggtgacagagcgagactccatctcaaaaataataataataataataataataataataataataacttaatcttaggctgggcgcagtggctcaacacactttagaataatgaggcaggtgggtcacttgagcccaggagttcgagaccagcctgggcaccatggtgaaaccttgtctttacaaaaaatacaaaaattagccaagcacagtggtgcacgcctgtagtcccagctgcttgggaggctgaggtgggagggtcacctgagcttgggaaagttgtggcttcagtgaaccatgattgtgccactcactccagcctgggcaacagagtgagaccctgtctcaaaagaaaaagaaaaaaaagtaatcttagcattttgtcagtttctgctcaaaatcctcaaacttgccagagagatcccaggtcaaatttgtgttttctctgatacagactctgagtctggagtcacctaatgacttcctgtgccaccttcccacccatcctactcccagcccctgcctctggggcatatccccactgactgctgtggcatttcagtcccgggtgttggaggattcaggggatgccaaagcaggtatcaagactatggcagttttttgattcacctgccaagcagtttagcaggctgggtgccagcagaatcaagaaaactatgagtttcataagactggccaacagctgatcgtaattttagcggggtattggggacagagggacttattgtactattctccctatttctaatgtgtgatagagcattccagaataaaaatagaaaaaaaaattgagctgagttttgyttccagctcacttcccctctctcatktccccatttattttttgccattaatgtatttgtgttagactagcctgttagtatgagatatctgctaccactactgaagcatcatcatgggaagaggacaattgtagatattgggagatcaggattcttggcccagttctgctactccttagctctatgcaaggctctaagcaagtcacagatgtgatgagttttctcatctgttcattgtgactaattgtgttygtcctccatctcagggataaagagagaaataacacaygcgtcgcaatgctttgacaagttacaaactctactgcaaatgtaaggtattcatttctgctcatccttgtgcatttttatgggaggtataagtgcaaggtgacttagcaggtgaggctcagcttactggtatcttcctttaacctcccttattttatagctgttgctctgaccacctgcttctgtcggaagagcctctgggccttgggtttggcagcaggcaccctgctcctgatctatttcaaaacctctctgctctcctcacatgctgaggcaagccaagcacgagtcccaacctcctcagcaacttgccagggagagggtggttaatcctctccatccccaaggcagggagaggattaaacagaccacttgatcagttcagaaccatgatgttacggagatgcttgattggggaaagcattccctaaactaggtataatctcagatatcagggctaggcagacaccagtgacatatttccaaagtacttggagattttgataatttgggttttcactctcccaatagaatctgagcagcagctttgacaatcagtaagagggaatcaatattaatcaaactctttcaactatacaaagggattacatttcccttgccccttgcttttatgcttttactgttatttcttagccctgaactgagttgcgagactcccaggtcctagtctcagatctgccacttttcctatttatacaaggaaaagcaaaatcccagtaaaggacaaggaaaaatcaaacatgaagcctcccggccttctctgagagccttacaaggttctgttttgtcttttcagctgtgatcttagctcagagaaggtcatgttttgtttttgtcttttgtcttcctgcccgttccagttggtcctagtcttttgagatggggattgctgggaggtcacaatgcagggattgtttagatgacagggctgggagagcagcgctgaagtcatgtgttctgaggaaccaagaagcgagcttactcggtccatcagtggtttaattgttgggcctttctctgcaggtcttattttttagatgaaaagtcaggatacatggtaaaggtcagtgcttggggagattatggtgtcagaatatttgagcccaagatgtcttgggaaatctgggatataggttcatccttgtgctaaggcttctgaaagatcctagaaacgatttctgccattttcaagtctaccacactctttgtgaaattgaaattctttttattttttttggatgggtaaagagcacagagtggcaatgaacaaggaatttgggaccagaatcccagctccaccattaactagctgtacaattatctgtaaattacttagcttctctgttcctcagtgtcctcatgtgtgtgtggacaacagtgcttacctattgtttcacaggttgttgtaaggtttaaagaggcaacacatgcctggcatacaataaagactcaataagcaatagctacttgtagtgtatgatgggagaaaaatacgaataaaagtcacatgcgaggggagaagcacgattggtgattagcccatcaaagagaggctaactttgcactgtggtagtatctggcaacagtacaggaggtggctgggttttctgaggccatgtggctcctgaggaaggaaaaggggattttgaaaagcaacaaatttttattatggaaaattccaggcatatattcaagtagagagatcatataaagaactcccatatacccatcagccagcttcaaaaattatcaacattttactaatcctattttgtatatctcctcccctacttacctcttaccttgaagtattttaaaacaaatcccagatattatattacttcacctgtatatcataaaaatttttaacagatgacatttaaaaatattatcggccgggtacagtggctcacacctgtaatcccagcactttaagagattgaggcaggtggatcacttgaggccaggagttcaagaccagcctggccaacatagtgaatctccatctctactaaaaatacaaaaaattagccaggcttgatggtgcacgcctgtaatccagcttctcaggaggctgaggcatgagaatcacttgaagccaggaggcagaggttgtagtgagccaaaattgcaccattgtactccagtgtggctgacaaagtgagactctccctcaaaaaaaaaaaaaaaattatcaccctaaaaaattaacaattattccttaaaattgttgactactagggtgaccatgtgtcatggtttgggacagaccaaatttatactttttgggaagcatcattcatcataatgccctataagggggatttgaaaaatcctgatgatggatgtgtctcccaggcattctctcctgcttgctctgcctgtatccctctctctcatgcacactcatgcatccttcttccttttctcatcctgcatccagtgttttttctctaaatatgtccagaaggcatctgagtgaattcccctggctggacatactataggtgtctacttgatttgttctgaatttgtacaaatttttttcccaaagacttgtggctttctccagaggttgcagcaaaatatctagcagttttctggtttgcatcttagaacctgaaggaaatggtgagaatctattccaaagtgggatggatgattcgatgataacaatggacacaatcccatctaaatagaagattgtcaaagacattcaaagcattatattttgtttccatttttttctcatctaacattttatatagatgaaatagaataagaaataaactgggaaccggggttctgcctctaattagctatgtgaccttggatgcatctgttacccactttaagccttccctaaacacatccctcccacttttcccagctcccattcccatttatctgcaagtcacttggcaactatgactacattgtaattagattttcctaagagttccttgaaaaacacaaagacaaggaatttctcttagttctgtttgcatctccagtgcagagcacagggtcaggcatataagtagctgtttaatggataagtttgttgtgtgaataatggataattgaaaaacaaatgagccctacttttcacttctgtccaaatgagactaggttctccttaaggtttctcaggtttcgcggtttcctgaggctctcagctaacttacaatggagcgggacacactgagctgaggaaggcagggaggggcmctggggatcagtgaccaattctcttccccagccctgttttctcttccccagccctgttttctctgtcctttggtcccctcccrttctttccccacagaactcttcctcacacgcttatttatcttttcctctttctgcatgctggttcttagggctccccagaataatccagaagtcgattccatcatggcagaactcaaggtggaggcgccggccagcgtagactggcagaaacgctgcctgaccctggaaactcagcttttccggttccgcctacaggccagcaagataagggagctgctggctgacaaggtgagtccctcagagcagggagctgcctctccacacgcagaggtttatggcagggagggccgtgtgagagagggagagttgsggaaagtcarctttcagtaagatgcttttccccatatgcaaaatgaaacccaaggtagtttaagaccaaagtccragcagtttactaagctgttatcttgcttgcgtmtttgctcgctcattaaggcacaccaaagacatgctgccaatcttctcggtcccccatcacttccggagtcacctgtggctgcagcggagaggttctattattcccttaacgtttctttctcagtgtggggaaggacggtgtttcgggagaaaacagaaatctctacccttcctctcaccctttgttaaataaatgagctacaggaggtgttctgctttcctggtaacaaggacacaggctttggagccagacctaacttggctctgccacttactggctagatgaccctgggcaagtcccttcacctctaaggcaaaaaaacacaaatgtctacttctaagagttattttgagaattatatcagatcacatatgtaaakgtcctgacatagaataggtcttaaatgggaataattattttatttacaggtttgggtgggctggtctgggaaactgaccacctttcctaatgtttctgtgggaagataacattctattttattttattttattttattttatttattcatttattgagatggagtttcgctcttgttgcccaggctggagtgcaatggygccatcgcagctcgccacaatctccgcctcctgggctcaagcgattctcctgcctcagcctccggagtagctgggactacaggcatgcaccaccacgcccggctaattttgtgttattagyagagacgtggtttctccatgttgrtcaggctggtctsgaactcccaacctcaggtgatcctcgcctcaggtgatcacctcagcctctcaaagtgctgggattacagacatgagccactgcgctcagctggaagatacattctaaactgctaactttcagaggcattctggagcataacccatctagagagtgaagacctgcacttaaaattaagtgaatcaatcattatatgtatagttttgtttatagtatccatctgcttagcaaacccttctttcataagtacaaagggaaaattcagctcacacctctccaaagaatgtcaaagtctcaattagtaaagcccaaatggatgacctgttttattgatagctggagtccagcaggacaaatcagtggcatcaccatggctaaggggagtggtcctggactagtctggactagaactcttgaaccttgggtctgttgacattgttgtctcctaactcagactttgcaaaacagagatgtgcagggtactgccaggtactgccgatagaaaggaatgaatatacatcaggaaagggcagcagaccttagacagtgattctcaaagtgtggtcagaaccgtttggccagaaccacstagagtgcttgttaagcatgcatattcctgggttctaccccagtcctctcaattgaagtctcctggggggttgctaataatctgcatgtttaacaagcgtccagaaaatcattctgtacactatgaagtttgagaaccctgacttaagctatggtgttggaggagggacgaaaaggaaggaaaggataagtagggattgactcagccaggcagtctgagatatatctcrgagggaagagacttctgtttctagtaatatggacaacaaaataacaaaaaaaaacccactatgaatcacctggaaatactgggttaaatatttaaaatattcatgtaaatgcagagctgagcacagaaaaaagtaagaaaagtcctcaggtaacaaaatgaagaggggatagccacagtggtactcaactctgacagctgattgaggggcaggtggtgtgtgactggcctccctagagtaatgtaaggtttgaagttagagttttaatatctgtggggatagaaatgaggactggccagctggaggttggagctgaaacagacttctgcatcaagtcaggactattatttcttttgattagtgtcagtatgaacaaaatttaaaaataaaaaatggtcaggaatattaaagggcttaccctaaataacaaggtagacaaggaaaggaaaatcattcactggcacaggagatgacaatagcttctcagacttagttaaggctctgggtagaaaaacaagagtagagtctcccctgagaacctgacgataacactagtttaatgttaggatttatactacctgtgtggtttaggaaacccaagttctgggccagtgatacccctggggagcctggtarggacagaaacaaaacctctctggagacacaagacctcaattcagatcacacaggatccacacagaaaaaaagccttaatgaagaggaatatataatcaaaaatgactaaatacttgaggaaataatctacaatgagtgagtatccacagacacaaaaaacaattagactagatccccaacaacttctaataatggaactgttggcaagagactatgaaataaatgagttcaaaagttttgaagacgtaacaaagaaaatgaaagcataagacaagaacaagacactacctaaaaagatcaggtagacttgaaaactaaatagaactttaataagtgaaagtgtttttattgaaattaaaatgtattaatggatagattaaacatcagattaggcaccatggaagatagacttaatggacaggaagacagacctaaggaaatcatccagaatgctgcctacagaaatacaaatacagcagttgagacctggatgttagaatgacaaggtcctgtatctatcaagtaagattccatgaaagatagtggctgaaaatttccaaacttgatgaaagatgtgaagcctcagattcaggaaacagaatgagtctaaccagggtaagtttttaaaaatcacagtttggttagatcattgtttggctgctgtaagaaagaacctcaaataacaatggcttaaaccaggctgatgtttctttctttctcatgtaaccttccagacataagcaatcaagctctagggtgatggtctctggatatttgaagatgggtcatctgatagtcacattccagccccttccctttaagttagtgactcggaggtttcatacctttcttctgctgatatgccactggccagatcttattcacatggttatacccagctacaaagaaggtttgtacatttctacaaacagaaatgtagtctttattctgaataactatgcgctcagctaaaagttgggggttctatttatatgagaaagaaagagaggatagataatagggaaaaaccagcagtctttaagtctagactaataggagggataacaaatagaaacagagtattcatacctcaaatcagtagagagaggaaatgaaaaaaggaaagtctattaaatacagatagggacaagaaaataatatatcaaaaaaaggagtaaacagaaaggacaaatgaagtggcagaaataaatccaaatatatctgtcacagggtgacatatattgcagcattgatgtatgaaaatttggaaacattctaaatgtccatcaacagagagatggataaacatattcagtgtatttgtacagtggaatactacattgcaattaaaaatgaatcaagtagaactacatttgtaagatcagtaaatctcaaaaatcagcattgaataaaaaacatctgaaggatatatacagcatcatacagtttatgtacttctaaaaaccttcaaagacagtactaattgttgtttctcatcccagatccgtgctcatggattttatatatttgggaataagcatctgatttcaattgaacaaaagctctgctgctaaaaaaaaaaaaaagttgaaaacactgtcttagattacaacagttagaaccatttaatggctaacctgggggttgcaaagtcaaatgcttacaggtaagctagataagtgaaaagagccaggtggattctgggagaacatgaggggacatgttgaagccacttattgccataagaaaatgtaacccaggtatttttactatatacaaatgaggtaaaaatataaaaacaaccaagtgtagggtcaacgccgggggaagggggtaaaattggagagaattatgcagggcttcaactatatctgtcatggtccatttcttaaagacaaacatcagaagcagatgtgacaaaaattaagggttgacgaagccgaatggtggatatatggttttttgggatttttttaagacaaagtgacaagtgacaggcagatacatgtgttttttgttttgtttttgtttttgtttttgtttttgagacaaagtttctctcttgttgccccggctggagtgcagtggcccattgcaacctccccatcctgggttcaagcgattctcctgccttagcctcccgagtagctgggattacaggcgcgcgccaccacgcccagctaattttgtatttttggtagagatggagtttctccattttggtcaggctggtcttgaactcccaaccttaggtgatccacccgcctcagcctcccaaagtgctgggattgcaggcgtgagccaccgtgcccaggcagcagacacatgtttttaaaaaattattctcatcaggcatggtgatgcgtgcctgtagtcccagtgacttagaggccaaggtaggaggatcgcttgagccaaggactttgaggctgcagtgagctgtgatcacactacactccagcctgggtgacacagcaaaatcctgtctcaaaggatatatatatattttttctctacatgtttctgtttgcctaaagtatttcataataaatgttttagagtgtgcctgtctaccctattcctcaggggccaacagagtgactggaaagccttaaccaccttataaacaccataccttctttctctacagcccctggagtctgggtaaactgaactttcataatattgacaccttcttgtcttcaagtctgtctctgatcctcatgtaaccagaatgtcttcacatggaaatgttaggggtgcatagtgtgatgagtcaagaaaggggaaaggcatagacacgggaggaacaactgggcatgtgggaggaaagaggggagagacacagatctggactagggaccatggggtgggagacttaagaaaagggctgggacctgagtccgacactggacctcttggcaggaaatcttaaggccacaaacaccatgttggtcaatgtcaggattgtgtctgtcctctgcaatcatccctaaaccagtaagacaggtccagcaattcatgagatgctttccctagcagagccaagacaagttatagatcgcaggaagagatgccttgggtttcttaggagagctcctgctggggccaagaatcatggccagttgctacacgcactgggaggagccatgtcagttgagtctctggccagccctcccacccatctgctcccctacctctctacccagctggccctgggacattacatgggctgatgactgcaggctgctcactgctggctatcctgtagggtgagcaaagcctgggtgcttccctgggggaccatctctgcttaggatcagacctgcctgtgggctgcggaggcttggaagaatgcccttcttcctaccttgacacagtctacttgcacctgactccctcgtacaaaattgtcattctagtcagggaataatctgtgctaaaaagaatttttttaaaaaagcagaaacatcaaggctcttagataatccctcacctaagggagagagagccggatgaagggagaggagagttgagactgtgcctttgctgttacacctctgggtctggtgtgctattgccatggtcacccagcctgcctgggccaccccattctggagccaggttagccatgggttcccttttcttccagtagaggaggctgagggagtggctgatgacttgagattcacatctcgccctgctttgctcacatcattttccctagctgtctttcttggcctgctagagaagccacaaaggctattcagaccaatttaaaaattgatactgttctgagaggccacataaatggatattaaaatgtgattcttccttggactttttcattcttgctaaacctgtttctcagttatcctatcagaaaagtgggagcatagtatctatccacaaaagagctttgtaggaattatcattatgactacatggcatcaatattagaactaatacaaggtttttctttactccctatctgcttctttatgccaaaagggctttgagggtattaataaaagaagaaataggccaggagtggtggcttacacctgtaatcccagcactttgggaggccaaggcgggcagatcacctgaggtcgggagtttgagaccagcctgaccaacatggagaaaccccgtctctactaaaaatacaaaattagccaggcatggtggtgcatgcctgtaatcccagctactctggaggctgaggcaggagaatcacttgaaaccgggaggcagaggttgcggtgagccaagattgtgccattgcactccagctcgggcgacaagagcaaaactctgtctcaaaaaaaaagagagaagaaataatgtgacaaaacattattctttttgtagcttaaaaccttctaactgaagcagcgtttaccaagtccagttccagtgcaaccatgtgtactttcgctctgtcacaatcgcttgccagtttcaccagccaaggttttggagtataactcagtttttgatctacctaccaaaaatttgtagttcagaaatttttctgagtggataaatggttctgttcactccccttaagcaagagaacaatggatgttgctccttccacctcatatggattatacagaggcagcagttcagcttaagtgccagtttcacaacatatgggtagcccagaaaaacatatcctaaaatatctcatactttgtgacaaggccaggtaccataaaaggagaatacaaggatgagttggaagtatgttgaagtttgcataaaatcatcatggaatgggtcttagcaggtctttgtgctcacagatctgatttgttttgggagaagatgccttctagggcttttattctgtggggtgtgtgtgcgtgtgtgtgtgtgtaaaagagatttttaatttttttttttttttgagacagagtctcactttgtcacctaggctggagtgcaatggtgtgatctcagctcactgcaacctccgcctcccaggttcaagagattctcctgcctcagcctcccgagtagctgggattacaggcacatgccaccacgcccagctaatttttgtatttttagtagcgacggggtttcaccatgttggccaggctggtcttgaactccagacctcaagtgatccgcctgcctcggcctcccaaagtgctgggattacaggtgtgagccactgctcccggccttaaattgcttttctaaccctctatttttattataaggctgccctcctgctcaccatagtatttctcaggaaccatgtatggatgagttctgtagtgctcgtgaaccatttgagaaggggtgctgatggggctacggctccaggctgcatccctgaaggagtcagctttgttttgcattctgtggccaggctactgtttcttacagtgtggtctgtggaccaccaccttcatccacaagcgctttctttataagcactttctggagctatgtctctgacttgctaaagaaaagctctgtgggcagagcccaagaatctgcatgatgacaaagcccacatgtgattcttacgcccttgaaagtctctcctgcaactaacctctgccatggccttaccccgggccccattcasctgtctttctagtggatccctggagccccatgtggcccagagaggttctggggttgtggggtacagtggagcccacagacaagacttggagccctttctcttcccagctccgtatttgtgtattttatgtatttggaaataagcatatgattttaattgaacaaaagatctgttgctaaaaaaaaaaaaaaaaaaattgaaaaccattgtctttatattttttattttttgaggcaaagtctcactctgttgcccaagctggagtgcagtggcaccatctcagctcactgctacctctgcccccgaggctcaagcaatcctcccaccttagcctcctaagtaggtgggaccacagttgcacaccaacatgcctggctgatttttgtatttttagtagagacaaggtttcaacatgttgtccaggctggtctccaagtcctgagctcaagtgatccatccgcctcggcctcccaaagtgtttggattacaggcgtgcaccaccgcgcccagccaaaacaattgtctttgataacaagagttagaacaatttaatggctaaaactgggggttgcaaactcaaatgtttgcagttaatttacatagatgagacaatgaagagagtgagaggttctaggaaaacgtgaggggaagggctaaagccacttactgctatagaaaatagaaaatataatgctagtgtggccagatcttttgattttttaagagaagatggaaacaagatgtatatggaatctggatttttatgtgacatgtgagatttggatgtgagaggcwgtgtagtatagtggctgacagaatgtactctggagccagtctacttgartttgaattctggctttgaatcttagtaactgtgtgaccttaggcaagttaccttacctctctgttttagtttcctgatccacacaatagagatactaacagtacctgccttctggggttgttaagaaatgtaaatgagttaatgcatgtacagtgcttatgacagtggccctgtttagctacataagtgtagcctaaatatcctacatgtatatacacacagccctacacagaccaagtggtcctgtttagctatatacatataagctaaatgcccacaacacagtgtgagtcttataggacactctttaaattaatagtgggcaacctctggcttaaacccattctttctgtaggtgaatcctaagtagtccgatcatataatctatcacctaaagcaggacactctggagagaaagtgaaaggaggctgtattactagtcatgctgagacaacaggtgagcatcacactgtcccggccaaactggtctccctgctcctaagtgccatctttgtataggacaaaagccaacaagcagcttttacctataaatttctgaatgccaagccatgcacatgtactttacatggggcagcttgtggaatcttcacaacgatcctaggaggtgtcattattattatatatatatattttttactgatgaggaaactgaggcacagagaggttaaggaatttgtctaaagccacactgtggtggagtcagtgaggttccactgccttacctcttagctgtgccattctctcccgtgggtgcaaggcagcggtaataatgttgaacctttcacgcctgtaatcccaggacttagggaggccgaggcaggcgaatcacatgaggccaggagtttgagaccagcctgaccagcatggagaaaccccatctctactaaaaataccaaaattagccaggcgtggtggtgcacgtttgtaatcacagatacttgggagatcgagaatcgcttgaacctgggaggcggaggttacagtgagctgggattggccactccagcctgggcgacacagtgagattctgtctaaaaaaaaaaaagaatgttgaacccttttctcaaagggatcattgagacccgggatggtgtggctcttggctcaggccactgctcggcacagcaggactgtgctgggagtacaggagagtcccaggtgctcctgccactgtgggctggtatttcacagcatctcacagcgtgtgacaaggagctgtacacttgggggttaaataccagattggtgccaagtgcacttcatcaggttgctgcagccagttctagggcagcttatgwgtcttatgtgcagctggtgaaagtagatccctgtcagccacctaaacctgacacctccttggctggcgtgttaccccagacccacacactgaaaggacagctgaggacatggtcctagaggaccctggaacagccaaataagggttctatagcaccagctttgcagagctccaggtgtggcctttaagcaaaggtgaagaagaaagatctgccctcgtgaaaagtgttgatgctggggctaaagtgttcagacattagttttagagaaaaaagaatactgcaacataaaagtgaatatgaaatgctttgagtgtcaagtgtccttgcagggtggataagaaggactggctgggtgcggtggctcacgcctgtaattccagccctttgggaggccgaggygggcggatcacgaggtcaggagatcgagaccatcttggctaacacggtgaaaccccgtctcttctaaaaatataaaaaattagctgggcgtggtggcgggtgcctgtagtcccagcwactcgggaggctaaggcaggagaatggcgggaacccgggaggcggagcttgcagtgagccgagatcgcrccactgcactccagcctgggcgacagagcaagactctgtctcaaaaaaaaaaaacaaaaacaaaaagaaggactgggagggtcggcagtaatgaggaccacctggcagtgacagagggtgacccagggctgggaggataccccaggggagaccccaggctctgaaaagtgccttgccattcaatctacttcagtaatagcatgtgcatgggatagataataaaatccggaggggaaaaaatgctcgctgtgttgtcaataacagagcgatttctggttctgaccaatgtcattgacttatcactcttgacccaaatggaaatgcctccatgagaggtaagacccaagtttatcctttactccaccttggyctccatttgcaaaagagcaagacaagtttttccatcagatgaagtcagaaaatatcagccaatcgtttcagaatgtcacaaatatgaattatcatttctaatggaaagcctatgccttcttctgagctacagagcagattagttaggtctcagtagtcctgctgaagtgcaacctaggaaacttattgagggaccagggccttcccgttcagtatttcattttattcttgaaaaagaaaatgctcctcatcattgcattcattagattatttctgtgtgggtaaaaaaaaamccccaaaacccaactctgtctggcttaagcaaaggggatttattagaaggatcctggggcagctcacagaactgaaggaactatccagcaatcatgacttggtgaggtttgtgcaccttctccagggcacctccctggctccagcctctgatctcttgattccagattcctggagagagagaatctggctggtccagttaggtctggtgtcaaagagggaagggttatgcagtaccaacactgggggccaccactatgtatcaaccaaccccccaccaccaaggagaattccttttgcactgggcaaccacccctataaacataatattgatttatgctgtgctgttatctgccccgtggctgcatggcaactgtgtgaaggtcaaggaactcctctgggacaggcctgaggactgtttgacttaggacagtccatctggctcaaaccgatgcctgaaactgaccagaaccaacccacccactcagcttccatctagaggtttcagtagtgttaccgcaagagaggaaggaaagaagggatgtgggtatccttggcttgaacacgtgaatgcctgtcagagggggccctatccatgggagcaccagggcatttttgtcccatatgggttgtaagtcttgagttttacttgggatcttcggatgagcataactctaactctctgtccaagggaatgtgccccgaaagcatctgtgtctccccagtcccagaaaggagaaaaaaatggatgagggaaggccaccctgagcaaagagatcccccaggttcccaaatatgaactactgcttccatgtaactttcctctcactgtctagcagcaggctggggggtcctgctcatctaccttttaattaaggaaagcagaatttcagctgagagattgggaaagagagaaggattgatcagttcactggtaaatatcagctagggtccaggctgaagggagaaggttgagtagccagagaagaggccaaatccttagagaggaggttggcctggaacttgggaagtgaggggcactgggcctgtccagcctcgtggaaggcgtggctgggatgcaacgcctctgggacatgtatgatgcatatgtgttactctgggacaaggcaggctggggaaggaagcagcagccccagctaggcttggcacatggtgttagacatgagagcgggatgcatgaatttgctctgcttctgcgggtcctccatgtgatgatgtccaattgggcagcacacggtggtgccctggcaggggaagaatgggagctgacatctaacgcacacttcacttgccaagccatgagcttgagaagctgcaaagagatgccatgtaggctgtgggctcgtgagcagctctttagtcttcagcttaggtctggtccctgaagagcctccacgtacaagaacttcagtccctttgcttgggccacttggtgtaatatccagaatttccatgctcctcagccttgagtgacatgcctctactggcagcaagacagaatttttacttttttaaatttttttttgagacaggaccttgctgtgtcacccaggctggagtgcagtggtgccatctcagctcactacagcttcaacctcccaggctcaagtgatccgcctgcctcagcctcctgagtagctgggactacaggcgcacaccgccaygcycagctaattaaaaaagaaaaattttagtagagatgaggtcttgatatgttgcccaggctggtcttgaactccagggctcaagtgatcttcccgccttaggcttccaaagtgctgggattacaggcatgagccactgtgaccagctcgcaagatagaattttgaaaaatgtatcttgagcctctctttctctttctagttctttaagattcaagaaatcaaataaggtgatagccctgaagcccttacaggcagaggtgccctcgactgtgggtgaggaggtattcatccccaaccagtgagatattctgagtggggagaagtgttttctatcgatgacacagggtgggccctatgggagcagcagcatggccccaccttcgacccaatgctgagaggaaaggggcctcaggaaggggagactgaagccaggacagggtgggatgctcaggaagaatgacagtggagctgctgccctccccggacaccctccatcaggacaaaagagctgggcctccactccctcagtagagaggacagcagccacgggctcttcacctgccccatgaactcaggattagggagctgagagttgccttgaaaatccttaccctgacactctngagncacttgagatgggcacttgaagtctggcctgtgtgcagtgtgtgcacagttctctaaagtggccttgatgccgtgttcacagtagggacatggcacctacatctcccctttctctctggccaagcagatgcaggagctggagcagaggctgctggaggcagagcagagagcagagaaygctgagacccaggtaaccaggggaggggatcggcgggaatatgcaggggaatgaccgtcggcccttccaggcccttcccacggacacaggtggacacatacatcaccagcagtactgtgttatacctgaacaaatgagtgtgcgtggagctttctgtgggagtagagtctctgggtaaagatcagtgtagcaagtgggcatagtagtccaaataggctagactatgctgtggtaacaaattaagtctgaagtctcagtggtttatcacatttagttctcactcgtggaacctgtccattgagggttagccagtgattccgcttccacagtcactcaggaatccaggttaaaggaggcttgcctatcttatagctggaccacttggaatgcgcagccttcttggttgccatggcaaggaaagaaagctggatgtattttttattagagatggggtcttgctatgttgcccaggctggtctcaaactgctgggctcaagctatccacctacctcagcctcccaaagtgctgagattacaggcgtgagccactgtgcctagccttatttatttattttattttttaaatagagacaggatctcactatttgcccaggctggtcttgaactcctggggtttaagcagtcctcctgcctcaacctcccaaagtgctgggattacaggtatgagccaccacacccaccctgcaccagcttttaaatacttaagcccagcggggtgtgacggtatgcacctatggtcccagctacttgggaggctgaggcgagaggatctcttgacatcaggagtttgaatctagcctgggcaatatagcaagatcttatctgttttaaaaaaattttaaataaatatatacatacatacatacttgagtctagaaatgatgcaccatttccacttggaccccattggttggatcaatgacatggctccatctagctgcagaagggttgagaaatatgggtcagcacatggctgtccagtgaacagtaaatatctctaccacggtggggttgggacagttgctctcctaggctgtttgtcctgcccaactcattcctcctgggatccacagaggtcaatggcacaagacccagctgctttttccacttatcgtctcctctgccctcctcttacctatctctccattactaactatgacctagagtggccaaaatgagtttcttctttgtcagtccttcttttgctcagattggaacttaattgaattaattggctcagactgccctgggtaagggctgtgcctgggagtcacagcctggggcatcagacggtgtcccatcccacgttactggccactgcacaccccgtgtgagtgatgggaagacactatgagatcattgtacttttcaggtgggtgtcatggaagagaaggtaaaactatccartctgaagaatgtggactctgaggggagcctgcaccggarataccaagaattgctgaaagccataaagggcaaagatgagctcatcagccagctagaggctcagctggagaagcwggtaagggctcatscgcaagggagcaccatgccctcttcgacatctgtactgctggcccccagcttcctgagctgttccgctcaagccctctagtgctggggaactcgctccctcctgagcctattcttttatgtgaaaatttaattataggaaggactgttcctcccacatctgctcattagaagccaggcaggggatagagtagaaaaaggagcttggaggcagactgatctgggtgtgaagcccacctctagcacctgctgcctctgacagtgggcaaagtgtttaagtcactgattcttattttacacatttataaaagaagggtggaaacacctcatagagctgctgggagaggcaacctatgtgacctgtgcctagtgtcaggcacgtggtcagtacttggtaaggagaacttttctttctccattctggccttgtcgtgccctgccaagatgagatacttgatacttggctgtagtatgatcagagctgcacagagctggatggtcagtcgtggccagctggttgcccaaagtttcttagtgaagctgaagaggcagagaccaaagttgttgcctcctcagaaaaccagggtcttcccttctgagcacatgggagcccaggagaggccactgcccagcatttcagctccacttggcacctttgctcctgagaggacttctggaacatctacctgccagttcctgtgtcctgccttctccccttcacaatctcaccaactccatcccagttctgtccctttcctctgccactggccttacctacccagctttcccctcgtgccagaatgccatcatttccaactaaacaccccacagtctggacagatgacttttaatttcctacacatgccttctccatgtaggagaagccgatcctggtggtgccttccaaccatcatgggcagattcatgtttacccatcagcattaacccaataggcccttaatggaggtgcctttgtatgctgtggggtaccatgtgctcctgaaaattgatggaagaatagaattttgacacatggaatctctgatcaattcttccattgattttagacataccttctcttctgagtagctcatagttagaagtggcagcatcytgggggttggtggacaaaatgactcctgctaaagctccttaggtcagaaaaaaggtcattttacaattggaatcagtaggtcaatctcataaaagaaaaggcactgttttgtgagtcaagagacctggttttagtcccagctgtgccatgaatggacagaggcaagtcacttcttgccatagccttarttgccacagaagcacaaagacaatatcaaaccaggtcagggttggccgactttttctgtaaagtccaggtagtaactattttatgttttgtgggccacaggtctctgttgcaactggtcaaagctgctgttgtaacatggaagcagccacagataatacgtaaatgaatgagcatggctgtattacaatgcaactttatttacaaaaacaggtctgggtgggggcaagcaggtggaggactggatgtggcctgaaggccattgtttgccacaccttaaactagatgacctttaaggtccttccagctctgaaatactgagagtctgacgttgtctgatgctgggattataggcatgagccaccatgcccagccaggctgctcctcttyagatgccaaccttttcaatcatctcctcttttgactactttgatggaaatacctcagttatctgcaattttgccttatttttttgttttttaactataaaggtaacacatgcttatagttaaaaataaaaaaacggccagaggagtataaaatgacaagtcacctctctctccctccccagtccttgatttccactcctcactattaactttgcttgcatatggaggcacagcgttctccttccatgtcagggatatgccgcgtttattcagccaaccccttygtggtgaacacttagactatttccagttttgagtttttaaattttgtgttaccttatcaaataatatttcaacaaacgatttctgctcactggctttgcgaggtcagtggcacgcacacttggcctttcttggggtttcccacctccagtcagtcactctcctggtgattgttgggattaacggaaggccctctctttcttgcagaagcagatgagggcagaggaagcaaaaactgttcaagaaaaagctgcaaagatcaaggaatgggtgacactcaagttggcaaaggtgggttggaaactcatcttggaggcctgccagaggcatggctgggcctgccctgacccccggagtttcctgccccctactgtctagggtgcctcggctgaccttcattctgtccagcacttgttttgcattcagcctccatgctgagacaccgtagttcacttcccctttccttttgtcttggttgggtctccctggagctcctgactagcttggtgctggatttaagtttgcgagaaggaatgtgtctcacttctgaaaagccccctcagtttctttctaggaagcccacacaggccagtgtccactctctccactttctcttttatttttatttatttatttatttattggagacagagtctcgctctctcgcccaggctggagtgtagtggcgcaatctcggcttaccgcaacctccgcctcccgggttcaaccgattctcgtgcctcagcctccctgagtagctggggttacaggcacgcaccaccatgcccagctaatttttgtatttttagtagagacaggtttcaccatgttggccaggctggtctcgaactcctgacctcaggtgattcacccacctcggcctcccaaagtgctgggattaaaggagggaaccaccgtgccctgctactttctcttccatcctcttcattctttttaactatttgtgtgtgtgtggtaaaatatacataaaatgtaccatttaagtgtacaattcagcaattcagtggcattaagtacattcacagtgttgtgcagccatcactgctatctatgtctaaaatttttccaaacagaaactctgtacctgctaaacactaacttcccattctctcttcccccatcgcctggtaacctctattccaccttccctctctatctatccatttttgtagtttatcacgtgctgtacctttatttaggaaactcaggacttgaagctacagtgctatcaccaacagacagaaaacaacctccttctaaataaaaggagtgggaattgcagtttggaaaaggatgaacatatatcttttttttttttttttttttgagacggagtctcgctcttgtttcccaggctggagtgcaatggcacaatatcggctcwctgcaacctctgcctcctgggttcaagcaattctcctgcctcagcctcctgagtagctgggattacaggcacacgccaccacgcctggctaatttttgtacttttggtagagacggggtttcgttatgttggccaggctagtcttgaactcctgacctcaggtgatctgcccrcctcagcctcccaaagtgctaggattacrggtgtgagccaccacacccggctgacaaacatacatcttttcctctgtcctcacacaagtggttcacacctgcaggagggtatcrgctcatttggcctcctatccccttctttggatgtacatctcaggtcacctgctagactgcaagttcttggagacagaactgatgcctggcttacctgcgtattctcacagtcccaacccttgctaaaagatactcaataaaagtgtgttggacttaatttaaaggaaaatgcaggctgggggcagtggctcacacctgtagtcccagcagcactttgggagactaggcgggtggattgctcgacactaggagtttgagaccaacctggccaacatggcaaatctctgtctctacaaaaaatacaaaaattagccgggcatagtggcgtgcacctgtagtcccagctactcgggaggctgaggtgggaggctaaggtgggaggatggtttgagccctggtggcagaggttgcagtgagccaagattgcaccactgcactccagcctgggtgatagagccagaccttgtctcagaaaagaaaagaatatgcagcagccacgctcagtggcacatgcctgtaatcccagcactctgggaggctgaggtgggcagatcgtttgagtccaggaatttgggaccagcctgggcaacatagcgagagcttgtctctacaaaaaaataaacgaaattaactgggcctggtggtgtgtgtctatggtcccagctactcaggaggctgaggtgrgagkatcagttgggcctgggaggtcaaggctgcagtgagccaagattgctccactgcaattcagtctggccaacagagcaagaccctgtctcaaaaaaaaaaaaaaaaagaattgaaaaaatacatctaaacctgtaggctgggtgtcctaaatcttcatttttctttttgctcagcttgagatggagaatcagcatctgaaaagccataatcagcgcctggtggagcaggtgggatcccttcaagatgcgctagaaggtaggcaggccagggtgtgcaggtgtgcagtacgtgtgtttggtgggtatggggctgagctacgggagctctcaatgtgactgtttttacccgaatcacagctattcagatagctccttcacggaagctgctggtgcccccctacggagctgcagagcaggattctgtcccttcagagccgggaatccagcctatgggccaggacagtggctcccaggcccagggtctgaaggcagctgtgcttgcaccttccccaggtgccctgcagagcaaggactctgtttctgaagcagcaagccccttggaggattctagttccagcacggtccattctggggaaacagtagaggccaagccccttcaacctcatctgggaagagagagccctccccaccagccatgcatgaagcttcttaccttcagatgtagttcagcttcctggggtgagggtctggttactgctcagagagggatgctccctgggacaaagacctctgccagggaaggtggtcctggcagcagtctgaccctaccaaaggtgcgggctcctggcaccccgcrggacagcatccagttggccaaaaggcaccacagccagccccaggtgggccatgggcactttggccgtgtggtraacattgagactgaggccttctcagccctccacccctctggccttcctgagctggagtcccgagctaggtcccgggaggaaccagagaagatggagatggaggagccacccccagcagggaagaatgaggaaagagagagcccaaaggcccttggagctgagctggaggaagtggagctgggtaacaagccacctacacccccgctgcaccagttttcatcctgggtaagaggcaacctcygggctgggcagaggagcagagctaatggcaagaacactgctggctgagcacagccatgcactgagcaggagaggaggctgctggcatcctcatggtggccctggcaggcaggtaccatggagcctgtgcagaccacacaaccagtgagggtcagcgccagaattcagaatgatgtgaatggcggttggctgtcatttcctgagtgctcaccgtgcaccatacattgagctgggtgccctgcataccttttctcatttaatctttgtgagtctttcaggtggtctggtatgatggtcaagagcataggccccagaagcaaaccactagggttgaactgttaactacgtgaccttggacatgttactgaacctctgtgcctcagcttccctgtctataaaatggggataatagtacctactttatagggttgttgtgaaagtacttacagtagtggttcacagtaggtggtaggtaagtgttggctatttttctttctttgtttttctttttcttttcttttttttggggggtgggggtgagggggcagagtttcactcttactgcccaggctggagtgcaatagcatgatcttggctcactgtaacctctgcctcctgggttcaatcaattctcccgcctcagcctcccaagtagctgggattacaggcatgcaccaccacgcccagctaattttgtatttttagtagaggcagggtttcaccatgttggtcaggctggcctcaaactcctgacctcaggtgatccaccctcttgggcctcccaaagtgctgggattgtaagtatgagccactgagcctggcttttttttttttttttttcgagacagagtcttgctctgtcacccaggctgaagtgcagtagcacggtctcggctcactgcaacctccgcctcccaggttcaagtggtactcccacctcagcctcccaagtagctggaattacaggtgtgtgccaccatgcccggctaactgtttttttttttttctgagacagagtcttgctctgttgcccaggctggagtgcagtggcacaatctcagctcactggaagctctgcctcccagtttcacgccattttcctgcctcagcctcccaagtagctgggaccacaggcacctgccaccacgcccggccaattttttgtatttttagtagagacggggtttcaccatgttagccaggatggtctcgatctcctgacctcgtgatccgcccgcctcagcctcccaaagtgtaatttttatatttttagtagagtcggggtttcaccatgttggccaggctagtctcaaagtcctgacctcaagtgattcacctgcctaggcctctcaatgtgctgggattataggcaactgcgccaggccagcttccttacttgtaacattggataaaatgtcttgatgtctgtctggtagaaatacttcagaagcaatgatctggttggtggccaagggtggggacacagatgaagcatgactggccacacatcattaacctttgccaagctgggcgatgggcacgtgagatcattctttttttaactgagacagggttttactctgtcgcccaggctggagtgcagtggcgcaatattggctcactgcaacctctgcctcctgggctcaagcaatcctcctacttcagccttctaagtagctgggactacaggcatgcaccaccatgcctggctaatttttgtatttttagtagagacagggtttcactatgttggccaggctgacattttttttttcttttccttttttttttttgagacagagtcttgctcagtcttgcccaggctggagtgcaatggtgcaatcatggctcactgcagcctcaacttcccgggctcaagcaattctcccacctcagcctcccgagtagctggcactacaggcatgcaccaccatgcccagctattttttaattttttgtggagatgggctaacactatgctgttgccctggctggtctcgaactcccaggctcaggtggtcctcccaccttgacctcccaaagtgctgggattacgggtgtgagccactgtgtctggccctgtacctgacattttccatgataaaaagttaaaataaaaatgagacaggctataaaaatgacatttcacaggtcactagtgaaaatggcatgtgggtattaagggcttcgcacggagcctgtgggaagggctcctttccttgcaaggagtaaggtgtggtttctcccttttacaggtcaggaaaccactgttccccacagacttaggtacttgcccaaggtcatgtagtagttagtgagggagccaggctttatttatttatttacttgagagacggtgtcttgctctgtcactcaggctggagtgcagtggcacaatcacagtccactgcagccttgtactcctggactcaagggatctttccaccccagccttctgagcagctgggactacaggtgcacaccaccacacctggctaattttttaaattttttgtagggatggagtatccctatgttgcccaggctagtctcaaactcctggcctcaagtgatcctcctttgtcagccataagagccaccttaccyggtctgagagccaggctttaaatgtagttccagctgctttgaagcccagctctcacattccagctgtacttcctcttaagggacattgccagagctaaggtcagtctttgattcatgggcagacatcccctccacagatgctgctggggtgtgtagcagtaccatgggggacagctaagcgttggctcctggcagcaggaggaatgaggtcacttgggagagggggtgacatcagggtggactcaccccacaccactgctcgggagacctgtatttccagcagtaactcccagggcctccttttgaaatgctggttcaaatccgggctcagtagcttatgcctgtaatcccagcactttgggaggctgaggcaggcagatcacttgaggtcaggagttcgagaccagcctggccaacatggcgaaaccccatctctactaaaaatacaaaaattatttgggcatggtggtgcacgcctatagtctggctgctcgggagcctgaggcagtagaatcgcttgaacccaggaggcgaaggttgcagtgagctgagattgcgccactgcactccagcctgggcgacagaggagacgatctccaaaacaaaacaaagaaatgctggttcgggaggcacacagcyctagacttttgggctatatccttggcagtgactgttgatcagcttctggttgtttcaaggacacctgtaagactggagacccagttgagccaagagtggggcacatcaggaagactaggggatggaaaagcactggtcccctgggctgctggctctcttcttgctctggagtccaaatgcagaggttgggagcaggaagtagtcaggcaaggaatgtgcagctgctaccagagagaagcgttgctcactttgccattttgccaaaatacagccattcactgtgatagcttaagagtaggtcttgagccgggtacagtggctcacacctgtaatcccagcactttgggaggcagaagcaggtagactgcttgaactcagaagttcaagaccaacctgggcaacacgggaaaccccatgtctaccaaaaaagatacaaaaattagctgagcatggtggcacatgccggtagtcccagctactcaggaggcttaagtggaagttaagtttgagcccagggaggtgaaggttgccatgagtcaagatcttgccactgtactccagcctgagtgacagagccagaccctgtcttgaaaaaaaaaaaaaagagtgggtcttctctatctgaacaggttaagtgtatgtgtgtgagagagagggtggaggaggagaggaggaatggggagacgaggagttattgtctcctcttattctgtatagaaaatatatcagatgacgttctccccaggaacctcagctgaactctggtgatgaaggtattaaggggattaaggtattaaggggcagcgtcaggtcttcccacagaacctccctgcccccagctaggccccaaggacccaagaatcagccaaaagaatgtaaggagatctcatcctgtttgcaatcccctttgtaacttgctcctggggaaaacaagacacaatgctagctccttcccaggcccctgaggcatgatcaykttccgtgttccggggagagcttaagaaatcacagtggccagaagcccagcctctctctctcccaggcaggaccaatggggcagtaaccatctggggagggcggtgggggaatgaaatgtcagagaacatttctcaatctgacggtgtgagaaatacttatgtatcttagagtttggaaagcccttttttcagttaatccttaaaacaaccttgtgagttaggcattagataacattttgtcaaacagtcataggtttcgttttacctaaatccttcaaacttcagtttcatttcctctgcaaagttagaggcttgtccttggttaaattccatgaccactctgggcagaaataatcctttttatgccgaattttacttgggcycgatgtatctgccctacacgagcacagaaactccctgccctgctgcagggccctccttggcatccttcctcaccgcccctctgtctcctgccgcccctccagtgatctcagcgtctcatggcagcactcatcagctctgccctctctcctcccagttgtcccagggctgctgctcccctctgggatgacaccctgataggcacccacctcccttccaatgccatctcctagcccatctgaccccaccaggtgacagcacatctagctacctccctgagccaacagggcattcctccaaaggctggtcaaccttccctcgtcagccttggtgactcacgtcacctttgttttcctttaggctcagtggagcaaacagatccagaaggtgcagggaaccctgtgggttgtttatgagcagtcagggccattaggaaaagctcctttggcctgtggcctacttcagacccaggggccccctcaggacgggcattctcccagtgtcttctgcatgggggtgctggagtcctgttgggctaaataggctttgtagattggccctgaagcctagccatgatatgacattattcctgcaggggaaaaaacgtgccctaagttcccacatatgttcatcacagcactactcacaatagcaaagacatggaatcaacccaatgcccatcaatggtagactggataaagaaaatgtggtacatatacaccatggaataccgtgcagccataaacaggaatgaggtcatgtcctttgcagggacataaatggagctggaagccattatcttcagcaaactaacgtaggaacagaaaaccaaacattgcatgttctcacttacaagtgggagctggacaatgagaacacatggacacagggaggggaacatacttagtggggcctgtcagtggatggtggcggtgggggagtattagggaaaagagctaaagcatgctgggattaatacctaggtgatgggttgttaggtgcagtagaccaccatgacacacgtttacctacataaaaacctgcacatcttgcatacgtaccctggaacttaaaaaacaaacaaattattttttaaaaaaagaaacaatagagaattttttaaaaatgtgccctaagttccaaacaactggcttacaaaagagcccttgtcgtgtggccccagtggcttcctcattaycaatatccccaacttctgggggttagatcttgagacccaagggtctctaaaacgggtaggattcagagcaacagtttactgacccatcttctcttgaacctcctttgccccaaaggtgaagggtggaggcaagagagggaactgttggrcactgattatattccaggtgttaaatgcttatgttaagtatttcattgattctcacagcagcctgaaaggtaagtattattacctccatttagagcagaggaaaatgagtctcagaaatgaagtaacttgcccaagatttgttagccagtcactgccccccacaggtctgcccacccccaaagccatgctttttcctgcacatgcctggagggggtgggatrggcatcatgccgggccctgagcttcctgagacctcttgtttcaggagagccggatctatgctgtggccrcatcgggcatgcggctctcagatrtgtctcccagaagtaatactgcatgctgcggtgagttccaagtgaggcttggaggcaccaaacacccaagrtgggcagggtgggcaagcggggaggagaagactccaagcaacacccagggccagggttggctggcctaccctgttcccctccccagcaggtgaagttcaggtgaaatcacagcaagtcccacctaggagggaaagggaagtcgtacaggttcagcccatcacaggaaagtagccagtcacagagctggaagggatctgagagggggcctccagcccagmctcccacctgcacaggcttcscttctgcagtgccagggccgtgggtgggaggagccacaagtgtcctgatttacatgaaccccactcactggctcctctccagccagccaccaaatctccacaacgagggctgtggggtggtcccatagccgtatgatttgtaactcacatctgcaacagtggaacactgtgcaagcctcatggaggaaaaaatggttaaaggtaaggcttttggattcttttgtgagggaycctttaccacatggagatsatggtccccaaagggagtcaaggggagaagatgaacagggccctggcccccctcttgagatctgtcactggcctgctcctggagggaatgccatctgcccagttctctgcttcccccacaccccytcctgggttatgcccttgagtaatctcattcctctcttccctgctcagcttcaagccctcctgcccttgtttcccctgggtctttctctggcctggtctacaagaatgtcactgtgcctgtctacacagcactgaagggggtaagaaactgctgcacaaagagrgggtgtctcatcaggaaaggcccctggcctcatcatccaatgactggggcggggctctagggccaggcttctgcacatggtgaccctgcccagggagctsagcccagcacgtgtcattttgttttattgtttattaggttattataaaaattccacatttacaaaaatgtgaatcagtatgaacgtggacaaggtaagaaggttaagcctatgcccgctttacagctctccccaccttttctcatgtctgcctcactcctcaggtcccagagggcagtggggctccttctagaattactgaggtatattccaacttatattcccgtaacgtcactacattttaaaaacaaaaatcagatagaattgcaatattttcatacacatttttgtctctgttactggtttttgaataatagtaatacttgataaaattttttatagaagaataaaaaaccaaaagtgaaatttcctctcacgtcgcttttccctaattcctaagcccagaggaagctatcatgaatggtttagtgtttattcagtaaggccttccgatgcatttataaatatgcagcacactctcactgtctcctgtgtgcacacaaaaggtgctcatatacatgtcattctatgccttgcttgttcccctaaccacgtgaataaccacgtgtcaggtcatccttccctacctcctcctttttatttttccgagacagagtctggctctgttgccaggctggagtgcagtggtgcaaccttggctcactgcaacttccacctcctgggttcaagcgattctcctgcctcagcctcctgaatagctggaactacaggcgcgcaccaccatgcccagctaatttttgtatttttagtagagacggggtttcaccatgttggccaggatggtcttgatctcttgaccttgtgatccgcctgcctcagcctcccaaagtgctaggattacaggcatgagccaccatgcctggcccctacctcctccttctataggtgtccagtacccttggtatcgaagcaccataactattaatacctaaagctttcctccaataataatttagtctgtgtccctgtttttctytaaaatgaatgttgccatgaacatcactgtgcacatatatctttgggaacttatatctacatgtgtctgtaggacagagttctagaggtgggatttctgggcaaattatatacatgttttaatttttgacaggtactgccaaattaccttctaaaaatgccttacacactagagttttttcccccatcttctccccatactctcaccaacactgagatagtcagtcactttaaatgtttgccaatggagatgcaatcattgattgttgcgacgtccccacacatttttaaagctcgcatggcacacttagtctgtggtgtagctttctggccccctagtggcaaggagcgagggtcacagtgggcaggcattcagtcgtgatgggcagctgctttggggaccacagaagatggtgtgtgggaagggaggcctgagaagcatggaggtcatgacacaggagtgaggccaggagggaccttacactggacagttgtctgttcagagtcccggctgggggttggccacaccatgggcacttggaccaggagtgcaagctgcagggttgggagaggactgttttgcagcctgagctgcagtgagggasgggcctgtcttgcagagagctacacagatcagcaacatgccctttatggacgagtcctctgggtctgacgatgactgcagctctcaggsgagtttccgaatctcggtcccctcctctgagtccaggaagaccagyggactaggcagcccccgggccatcaagagaggtacagagaaggggagcaggggcagggtgcagcagcaaggagcccctcacctcttcccatgggcacttgaacatgggsgtccccacttgatctgagctcgtgaccccccrgcagctccacccccagccccagagaccgggtcccgggtgggtggtcaagkctcagcagctcctgggctgcgtgagtcggggaggtgtgggacccgggccttgactcctcctccctcggcaaggcgtctccatgtcctcactgagctccgagggtgactacgccatccccccggacgcctgctcactggacagtgactactcagagcctgagcacaaactgcagcgcacctcatcctactccaccgacgggctgggcctgggcggggtgagccgggaaacgggcgggggcagggtggargcagaatgcagcagaggctgctggggccctcagcacaagacataggcagtagctgcctgaagtgaggggtccctagagctgggggatgggggcagggggcgtgggctgggggggtgtacagttatggagtcagacacacagaccccacaaggaaggaaggagggagcccagagagctcctggaataccagcaatggccagttactgagagcctactgtggcccaccaggccccatgaagagttttccatatatgactttgttttatcacctggaatactaacgcaagctaacatttattgaactcttggcaccaggcactgtgctcagtttccaggcattgtctcatttgtcctcacaatcctcttggggtcattagcccatcttatggatgagaagcctgaggctccaagctgtgccactacatgccagggctagcatccactcccgatgtaattccgcatccctcgccccacacctctctgctgccccatcatctccctggctccatgaccctccagtcctgcctggctgatgtgtccaggttgcccagacctgccttgccctctccctgctctgtgctgcctggaatggtcttcttcctcctctcagtctttgagggagaggctgaactatcctaacaaggccagctcagggccggctctctcctgacgctctccctggccaggctctccctctagcagcccctgctctgctaccttctcatagtgaggkcttccccagctagcatgggagcccttccttggcaggaccacccatgttttatttagtcctctctgaaccatagcagggcatggtactctgaaaatacactgagtaggtactcaataattttgtatttaattgatgaccgagtagtgaggcagctggaccacttggacctgtgtgatgtctaggagccctgagtgatttcccctttcttcatctacacccttccacccctcaggagtcactggagaagtcgggctacctgctgaaaatggggagccaggtgaagacgtggaagaggcgctggtttgtcctgagacagggacagattatgtactacaagtccccggtgagagtctccccgcccagcactgcagtcaaaaggtctccacatcacaccctggactatgtcagatgggacggaggagggggaatgtgkcycaaggccagagggcaaaggtctggcaggtggggagaggcaacctcactgggcccctgaggctttgagccacacttggggacctaagcctggccgtgagtttcagaatgaaatagggaggttctcagaaggacccatgttcctgattaaggttccatttagctataaccagaatctagaataagtcacccatcayaacacagccagaatgctgggaatcatgtttccctttgcttatgacgtggaggaagatctgagggtaaatgaggtgctccggaaaggctccacattcagtggctctcctctccaatactttctttacagagtgatgtcatccggaaacctcaaggccaagtggatctgaactcccgctgccaaattgttcgaggggagggttcacagacgtttcaggtgagcacgctcctggctgctagtattttaaacagaagaggtgctrggtttggatatggccgtgagtgagacaaagrtggggccaaatgagcatgaatgaaagacttcagatcaacatttggacgtgatcctaacttgtgagtacaagaaaggaagatgagacagaatatgagagatggagtgaaggaaggagagacagggaggaaaagatgaggaggaaaagaaaggagggavcactagggcaggcagaaggccagccccttgggttcagggacaggtgccacctyggagccaggtcctggttactccattctcccagcrtgctgccccacccccatatctcgccctccacagctcatctctgagaagaaaacctactacctgacggccgattcacccagcctgctggaggagtggatccgagtactccagagcctgctgaaggtgcaggccaccrggcctccagctctgcttcggggtggcaccaagcccaccgtgaagggctggctgaccaaggtasagggtggggctgatagggcaggaacatgtgcctcctgcgaatcaggggagccaggattggggtgccgagggtggtgggttcccccttatacggggctcctttctctgggagcctcctcacagtgactcgctggccagccctcaaacgtggtctggccacacaaggtgatggcgagtgattccccggaaacaaatcagggttgttggaacaactattctcaagaaagagaagggaagggactatcttgtatccattttgaggtcattaggggctgtcacccacccccaccttatacctgcctcagtgttaatagtgggaggaagaggcctgggcgaggtaggtatggctcctcaaagacttaaagtatcccaggcctgccctaaagacatttttgttagggctcttctggttgaacagagcagagaagcagttgttaaacccaagaaaatggaagttaacaaggaagtacattagctagaccagaacaccagcaggaaccaaagcgacttgcactcagcaagctcagggctggcaggctcgctgtgtggctctgcttctcgttcaatctgtttatgtcattctccttcgcccgtgtgcagcttctgttccttcatgatgcatggttgcccaagggcttcagcctgctgttttccctccctccctcccggcaccctgacaactgtggcttctgccacctagcaagttcttcctattttcatatgcctggaggggacatctgattggcctggctaatcgtttcatggcaggtcataggtcactgaatagcccaygatggctggggtgccrcagggtgtcatggcaccctcactgtgaaaggggtggttccattagtagggagcccaaatggcatctccatctctaccataggtcaaatctgtctccctgtggcttctatttgccagtcctggatttacttctaragttacctagttctcataatgccagttcatttctgtcttacaggtaaagcatggccactccaaggtggtctggtgcgctcttgttgggaaaatcttctactactatcggagccatgaggacaaggtacttctcagcctcctcacaatacccactctcctgcttcccccgaagcacatgactgccactctrtgtcctgatgaaagtccctaccccacgtaaccccacaataaatacaaaatcagttggctggatccctccagagtgtgagattctgcctgtctgggtctctggtgcttctccaagcaagcctcattctgctgccagcctggctgggatgctatagtctccacctccccatcctgtcatcggtccatatccacgattcccagcttcacggagcctatgtattcagagagaggagactccctcrtcccccactggctctcccattcatggaagactgctgtccacagcgacccctgggctgcctgcctgtgcgggatgcgcrcatagaggaagtagatcgatcctgtgactcagacgaggactatgaggctggaggaaccagacggttgctttcctcccactgcaccctggtgatccaccccacagagcacagccccacctacctcctcattggcaccaagcatgaaaaggtaaggaagagggctgggcctccagggccaagcttggacctgtgattctgatcttcccttctctctttctcctgagcttcccaaaattcaaatttatttccttttggacactttggcaactaatattctctgaatgggaatattcctttatactgaatttattcccagtgaccaacattgcttcactgaggtcatgtaatagaatcgcaaatttggaaagttgggttcatgttcacctgatcctcagtctttccaggtagccctgactcatgccaaccaaactagctgaaccccacatgggcttggtcccttcaaggagtcctccttggagctcttgcctccactcttcccaccccgtccccatccgatggctttccgccctcttccaggatacgtggctctaccacctcacagtggctgcaggtggcagcagtgccaaggtgggcactgcctatgarcagctcattggaaaactgatggatggtgaaggagatccaggtaaggcaagggtggccaccactgcttgggttggagggtagtggcttggtgactattggtcaagatcccaaagaaagcagtgttgtaccctgaagctgtttttaaaacatctaagccacagaggggaagttcccatccaagctccagggcccctctgtctccggctgagatactaaggtgaccactctgcatctgggggagtttatctgggaagcaggctttccagggacctgggtaaatgttttacttggatcaagctgccccgttgctggctgggcagagggctgaggaaagaaggtagctggttaatctatagttagagtttgtaaatcaacaagtgaagcctaaattgggatcggactaacctgtttggagtctttcttttgctactgattatcagggccctgaggaactaattaatggcatataccacacacacccctttactactgctctgaggcttgtttgtttctgaccaattcatatgcccctccatccagacttgacacagtaagaaagaggcctcccctgcacacatccacctgcactcagacacccacaaccttgcacactcacccctactgccattccacgagaaaggccatgcttatatgagggtgctcattgcagtgcccacctgtacaccccacactctatggatgataaacccagcacaacccaagtgttgacggaagataaaccactatcttccccataaattaaagatggcggtgagtgggagatgagtcccctctcagtagtaactgcccttgctctctggttcygtgctttgggcagattcgccgctctggaggcaccccatgctgtgctacagcaaagacggcctatacgcctccctcaccaccctgccctctgaggccttgcagacggaggccctcaagctcttcaaggtaaattggggtggcggccaggcccaccgctgggatacttgcaatacttgggtggagaaggcctgtgcagttggggacaacccacagagggatctggagaggaagggaaggaaacttcccagggtccctatcacttcctggatggcaggaatgtaatcctgtcactgggagggaagcagctctggaacgtcatgcacaagtccttgggaaatgccaatgaaaactctccctggaggagctcccctcctcctgtagttaagcagaaaaggcgaggtttatgttgcttctggactgagagattcggacctattttagcatgtcctttgtgaatgtttgagttttctgtttttgtttttgttttttttaaggaatttgtcttgtttatgtaatgtaatgagaacattttaaaaaggaaacttctatcccaaagtagcccatagccccttttagtaagcagagatgccctccaacagtagcagtgctccctcttagaaagggctgtcagtaaactctaacctccctggagcccttggaaaatggccaagccgttgagttctctgaacccaggggatgctggtctgcctgtgctcactgctgttccctcccagtcctgccagctcttcatcaacgtgccggtggaagctgcctcggtggactaccatgtgtccctggcccagaccgcactgcaggtctgcctggttcaccccgagctgcagagtgagatctactgccaactcatgaagcagaccagctgccgcccacctcagaagtactccctcatgcaggtaggcatgccaggggtggagcagctgacagaagccattggcaagggctgccaggtgggaaaggtgggaggaggtgactgggcaggtatacrgtgagcccagccagcgggcagcctctgtgctccaagctgcatcagtacggctgagctgtctatgcacagatgggtgattgcattctggacacagcctgaccaagttggccatcccagcacccagagcaagttgggggctctggtttggggaaagagtgctgaaggctctgtagctcagggctatgaggacaggtggtgctgtaggcccagcactcaccccacgctgtctgtgtccctggcagtgctggcagctcctcgctctgtgtgctccacttttcctgcctcagcatcacttcctctggtatgtcaagcagcagctccaacgccatgcagatcccaggtgagtgaacctggccgtttcctctgccacttgagcactgccaactgccgcatgaataagagggatgagaggagtctagggcagaccagatcactcctgtcctctgaaaccgctcagtggtcgtggagacttcacccattgccgtgtgcacaaatgggcacgtgtggatctgggcatgcttaagcttctctgcacgccaatccatgtatccacggatgtactgtggcaactctcacatgaagccacactgctcccaaactgtccccaagtgctattctgttgttatgtcctctgggttctagaagaaaatatccatgccagcaacctgctatataaaggtcctgaatgacaaattaatgtcccagaccagagtcttcagggcttttctcacaacctgccccagcyacagttttggtcctggctgagtctagatagggatccggggtgccaaagtggcagagatgagcagagcccataatactcccctcttccttctgtctttttagaagtgaaactggccagtatgccacctactgccagcgggcagtggagcggaccctgcggaccggggagcgggaagccaggccatcrcgcatggaagtggtgtccatcctgctgcgtaaccccttccaccactccttgcccttcagcatccccgtgcactttaccaacgggacttaccatgtgaggagctgggcgtgctctttgccccgagtcttctcacgtcaccatccagagwatacccctgggccttaggctcaggcttggcagattgttcactgttgccccagaagtagatattatgaactcactgcatgaacagggaagctgagatgctgaccaagaaataagaaagggcctccaaaagattgttggtaaaggagggacccaggtatgcccagttcatttacagtggataagctcacatccytcatgcactggccctttgcctgtgaacacagaaaccaacttgctttggccttttgtatttgcccttgctcctttccacctgctgtatccagacacctccaccagccctagtgagctcctctcaggaggttcactcagggttggaactcttctcccgcctcaggtggttggttttgacggctcttccacggttgatgagttcctccagcggctgaaccaggagataggcatgagaaagccatcccactctggctttgccctcttcacggacgatccctcgggcagggacctggagcactgcctgcagggaagtgtcaaggtgacagcytcccactaagccagctgagcccctccctgctcagggatattggtggtggggaaagagcccatctgatgggtgtctgactgtttggtagctcatttggtgctgagcccaaggtgctgccctagtcagcatttctgtgycatcctaaaatgtacctgggcagggagaaaaaagctgttgtgtgcccttgtctctggagacaagatcgctacacacctacttccctcgagtggctgtgcagcgtccagaagaaaagcctcttcttggcttggtgtagggacagtgaggccccacgaagccactgcctacacgtgcccactcagaggctcacagctgtgtgcttggaccccctggatgtcaggtggtacccagcacctcacttttaccctttctttcagggcctatgccatgcttataggttgaaccacacttttaaagaggcaggtccttatggtgctcctataagtaaaggccgttggatgggatttaagatcaatcttgtattgtggtctgggattactgtcctgggggataagtgtttgtaagaatgtgctctagcactttgatgcatatttggctccagtgtttgcttgtctttaacaggacaaaggcttctatggtcttttaacattgcctggaaaaactatgccacataccttctttgccaatgtctgggcatctgtgaggctttgttacatggtagccctctgggcatatttgttgaagaggagaatagcagtcagtggaatggaaatggagctggtgttcgaaggccatggggctgcctagcctctggggaggcccctcagctggtgacaccagcagggcagatttcttgctttattgctcaccctgtccagggttccctctgtttgtgagggagctgctgccaccttgggtccaggaagcatgaagctccgcaggtcagcctcctggtggraggacttttccttagttttctttgctcttctgctctgagtccagccctggctggaccttgatcccttctctccttatcaggaaattttctgactttcttcttttgccttttcaagatctgtgatgccatctccaagtgggaacaagccatgaaggagctgcaccccggaaagtctgagggtgggacacgcgtcgtgaagctgatgtacaagaacaggtcctaagcactgcacgagggtggggccaaacacaagggctgccactgggtgccagctcatcgcctcctcgactagacagcctatccagacggggggagggacccacagatataacactgcctggcagtcactagctggggtgcaggcgggctctgctgctgatactctgtgaaaccctgggcagctcaggccttctgtcagccttccctatactgcgtgtgcgtgtgtgtatatgmacacacacacacacacacacacacaaacatctgccaagaaaacagaccagaccaccctgggcaacatggcaaaaccccacctctacaaaaaatgcaaaaattagctgggcatggtggcatgtacctgtagtcccagctactcaggggggctgaggtgggaggatcacttaaacctgggaggttgaggctgcagtgagctgagatcacgccactgcactccagcctgggcaacagagtgagaccctgcctcaaaaaaaagaaaagaatagaaaatagaccaacctcatgggatggctaagtgtgttactttatgagagtgaaattttgtataagcaccagctagttatagctaaagactaagtacttcctataccaattccaggaaatacagaagtagacatcctgactttctatcaatttgagtaagaaaatcccatccctccatctcagtatgtctccaggcaaatagtttccagtagtctcttggactcttacctcatccagtcccctaatctataactccaggtaccagatttcccttactaaatccagtaagcttaatggtatcttcagaatgaaccatgccctcctgttggtatgagatcagcatgaccctgcatctgctctgtgtcatactcggttatatgtttctggaggcaatacaaaataggctcataaatagtggraaaagagtactttatctttttggaaataaaggtaacagacccagagaaagccccatccctgtttggaatccctgctgagtyctggyttcttattctcttctttgtaggctgtactttcgcagtcaagtcaaaggggagacggaccgagaacggctgctccttgcctctcaaaccagtagagagatagtggcagggaggtttcctatcaacaaggaattggctcttgagatggctgccctgatggcccaggtaaggttctgttcaggaagcaggagggtcgggttgccagcttagaatgaatgcaccatgcagcctgaaacacaggagagattctgcagatcctgtggtgctcaggagagggcagctttgccatctctgggatggaaagcagctgacttctacagatcagagctcctcactcaccgcagatataggatgcgtgcagatggctggacttggaatccagagacctgggtttgagtcctatataccttccaactatgaggtcttagccaagtcacttcacttctctatgctttagtttccttctcagtrtaccaaaataaaaaatacttggccgggagcagtggctcatgcctgtaatgtcagcactttgcsaggccgaggcgggcagatcacctgaggccaggagttcgtgaccagcctgaccagtgaaaccctgtctctactgaaaaaaataaaataaaataaaataaaaataaaaattagctgggtgtggtggtgggcgcctgtaatcccagctactcggcaggctgaggcaggagaatcacttgtacctgggaggcagaggttgcagtgagccaagatcatgccattgcactacagcctaggcgacaacagcaaaactctgtctcaaaacaaaacaaaacaaacaaacaaacaaaaacctctgccagcctccacagggttgtactaagtatgatacctggataattgtatcatgtaatgtatgtggtaaacttcataaaccatcagaccttctaagtagacttaggaagaggaacacacattcagacttggactctccttcccattatatttagaaggccatcttgccaaaggtatctgggataccttcatgactcccataagagagtctgacacctactatatacccacaaaaattaaaaattaaaaatttttaaaaaagaataagaatctggatttacatgctggaaaggaagaggaaacagtaatagttgatctttataaatatcaataggaatactctctaggaggccctgtactaagcatatatgcatcctccattgtagtttttattcccacctaatagatgaggaaattgaagctcagagagtttaagtaacttgatcagggacacaaagctgggatttgcgccaggtgtccaactccaaaggccacatttggaacactctgctgtactctaggatctgtagcatcttcaattctatagcccatatttttggactggaagccagaatttccacattgttttcccttgtcggctaccaattaactgtgtctttggaaaaggcacttcacctcagctgcaaaatcaaagttggtcggtgatctctaatattcgagggccctaagtttgtttctctagtgtctataaaacttgagatgaagcgtttttctaaagtatttttcacaaccactcgcaccccaccaatagggtaataaagaaatggtttatttcacctctcaacagcccccacctggcccatccactgtcagattttgactggtctcttcatatgcttctaccacaggtagaatatggggacttggagaagcctgccctgycaggccctggaggcacatcccctgccaaggctcagcatcttctccagcaggtcctagacaggttccaccccaggcgctatagacatggggcccccgctgaacagctgaggtaggtaggctacaaggtcttgcagcaagtcactgtggggaggtctcaggcctggaatgaagacacgtcggcacttcattggcactrtttctctccatctgcccacaccaggcacctggcagatatgttgaccacaaaatgggcaacattgcaaggatgctcccctcctgagtgcatccgcatctacctgaccgtggccaggaaatggcctttctttggtgctaaactttttgctgctcaggtaagtgccagtggaaggagctgcccacacccttaggtgtgtccccaactgctcatgtttgagccataccaatttgcagcccctacctccataccagtaaccaccagaggtcactatccctccactgtttctggcctagtccagctttccacagtccagagcagaattgtgattgcttatcttcatttgtcctttgttgactgccccaaaagaaaagatgtgatcaactaattcacacacacaaarattcagacttgaaataacagccctctcaagagtgctttcattttttttaaagtttgaaagaacaatgtataacctaaacaaatacatctccactggtttgacatggcatacaggggaatcaaattacttagccaacagttaatttcacctctgtatgaaggccaggtggccaacagtaatttcagaaggaacttttcttcactgggtgtctgttgtgcataaactttatagataattacagctcaaagctgggcagtgatcctgtttactgaagccacagatcggaaaatggccattcattcattcaacaaatagttgagctcctactatgtccagtgctggttgtttgaggttataagaagtgagaaaatcagacacagtccttgccttcctggagcttcccatctagtgcaggagatgtatattcatcaaataatcgtattcatttttttctctatgtatttaatatatatttataagccatcacaaatgctatgaagatgtacagaggtgttataaaggcatataacagggacccacttggtctgggagcttaggaaaagcttctgaaaaaggtggcatgtccaatgtctatctgcctccctttgggttaagagagagattttctggattaccatactgtagtcctggcagtgaaaattagtcattacaggaatgtccactaaatagtcactttcttactgatagggcctaaagccacaggactgcattcttgctttcctatttcttttacagcacctaggagattggctgaagtcagaagcacttcggcttkkagactataggtggaatgccgtgtttccaagactaggagaaaaccagctgttccccattcccctaacagagcagctagggctggcctctattctgtagcacagagctttccatccagtgtgctgtggcagcatgggttctagggacatcaaaagaatgatcgcctctgcctttgagatggttagtaggtggccagagccccaaggccaagggtctcctgtcacaagcagccttgtctatttcctgcatacactgtacaaatatcatctttgttttccaagatgaggtggctggaaatcactgcttagcagatccctggatgtgccttctttctcagaaagttattatagttcaaaatctctaactatggatatatctgatgggttgtttctgtttccccagcctgcccagctgtcttccaaggagaacgctctggtgtggattgctgtgaatgaggatggcgtcagcatcctggaccacaacactatggtatgaaaggatgcaggctgctccctgacycctcctcttcctcaacrtggtcttttcttctcctctgtggactcaaaagcctgaaccaagtgaccatggctgccctacccccactcctgcccaagcaccagtcctctagtctagacactgcttgtagatattcaagatggagatctccaaattatgaccacttgggagttctcctttcctgtgcctagaagagacaggggatgctggttcctagctcaggggacaggtggaaagtttccccacaactgactggttcctttccacagcaagtgcacatcacttacccctactcttcagtgacaacgtttggtggctgcagggatgacttcatgcttgtgattagatctatcccagacaagagctctggaaaaagccacattgagaagttgatcttccggatggctgctcccaaggtaggtctgacagctgttaaaacgttctactctggcaagatgtggtgggcttggagcttagaaaggaaactggggttatgctagtgctctgcaagggccctgcccagataaaattgttggtcttgtctgtaattagtattccaaaggttcaggtggtgttgcatctccrtatcaatgttcagctagtaggtaaagggacatatttggagggaactaactctggcctagctactattatgctcttcactttttcttttttattctctcaagccccagcatcatgcagtcctcagttgggtgcttacgtgcwcttctcttccttgcagcagtcctcraggcagggcagattcctctttaaggtgctcgcatgttacccctgggttctgctgacccaacattagctacaaagtgggacagtcccacagtgctccctcttccttgttgtggggaagaccgcaaaaagacctcttttgctttagtgactttgttcctactcaatacaggaagtgttgaccagcaaaaataataattacaaaggctaagttctgatttattgttcctgactcccgtgtgattaactggaaaccctgttgttctcctttttaatcctaaagttagagtttgccaaacctactcctcctttaataccacccctgctaaaggggaggatctccagatccctttcttaagaaggccccttccctggttgtagagctaaccagagcagaacactgggcctccttttctcagaagggcactgtgcatctgagaggatctccagaccaacaggagcccacaccactgggcctctgaacagcacagttatgattccctttggatattttctcccaggtgggtattttaagagattaaataaactgaggcccaggaactcagcataagagctaataagtaagaaagccaggattcaagccaaggctagttcaattccttcacatctctgacctcctcttagattgcagaagcyaccttcatcatggccagctatatgaaccattgcactacaactgtgaacccccccaccaacccacccggagcctgccagctgtgggaactggatggacgacagttcttttcttctgtttcctgtgctaccaaggggccaacgttgctgtgaatatttctcctacccgattccccaccaccactagtgcctctggatttagagatatatatcctagggtatgatactactgtgacgggtctaacagcccccggctactcttgttctgtgaaatgtgtattttagtctctgtgaagcctttactctctaggtgccttataatgtttcagggctcaactttttaaaatccagacccagtgttaaaaccatttattccttttttcataagaataatgactccagatgctacctgattctagacatagacagggatgatccactgttactgagggcatcagtgctataagttaaggctttctgcactggtactctcaaggaagctaattttctttctggggggggcgggggacacagtgtcactatgtcacccagtccacagggttcaagcaattctcctgcctcagccttcggagtagctgggattacaggtgtgcgccaccatgcccggctaatttttgtatttttagtagagacggggtttcaccatgttggccaggctggtctcgaactcctgacctcaggtgatctgcccactttggcctcccaaagtgctgggattacaggcatgagccatcgcccagcccagaagctaattttttaatattgtatatggtcttatttatacttgaagttttgtgaacgtcgctaaacaggataggactaaaatttccaattctcctacactctgtcagaagcctagaactcactaaactgggctgcctttcccaaatgggaaaggtgctgacagagttggagaaaaaagaatagactcatttttccccattattggtatgtaggcattggtacagccccttctggggcagtctttgcaggataacatgctatacctgctaagattcaagctgttttcctcacactggactttaggccaaacccagtaccacgcaatgtgcaagcaagggcaggaggtaggtccaatctgacccctccctgtctcattttaatgactggacagcgctcggtgaaggctgtgttcactgtagtgggccatcatttgtttccttcttcttgtaaaagaccaagcaaatgcactctgctttttgctgctgtaagaccaccaaaaatgagtcagaaacacagaagactatttcaggcatgtgggcctggatatgctccttgagacttctggcaaacttctgctgggaattagtttgagggtgagggtacatatgtgacatttgccctagcctaagagtagcaggtaaaaaaaagtttctttcatcttttgccttactgataataccataatccccctcaattcagaccttctgattgagtgcagaggagactagacagtctcctctagacaggttgtagacacaccctcccctaacaaaaacaaaacgaaagagttcatactctgattttccaacatctaggaaactgagttttatttcctagctctaaggcagccttactatatgtcagtaaagtgctgaaaactgtatatttagcagtagcacccaaaaccaagcctttaaccccaacaatgtgtgtatcttttgcacagcaaaaactgcgaggccagaactagtttatctgaacacctcagctgctgtaagcttctcctctctcaccccgtaaactgacaagcatgatgaaaaaagaagcasatccaagtttctgcctcttttaaatgtacttgactttgcaaggcaagtagttttacagccatttctgttcacacttttcaccccacaacttggggatctagctgagacatttctacctcgaacaagtcacatgtaccacaggttcctgaataattcctgcagggctggtgacagacataacagctctggttttataatatcttgggtatctctaaggccaataaggataacattatctacccagagagtttagaagaaaagtaggagtccraaggaagagtaaacaagaatggagctgtgttcacactgaatttggggtcaatctatttcccccaccctctctcctccccaacccttcaggaaccctttagtttattaatcttatacagaagaaactaacttagaaacaaaggattcaatatttgcttatttattctttgttaacatgagagtcccatgtctgaaaaccaaagtccaawttctgtctggccttttgtctcatccttcttggcaaaagtagcttttgaactgatatawaaaaaaatgctgagtaacagaaaagtattaatgtgcttgacaccatgactgaaatactatgatcttgtttgtcaataaaaagcagctatctgtgaaccaggwaactgtgtgttttggaagatctgtttattaacagtaaataaataagccctgtacagaacacaggcactaggttgacagactcgtcttttgtaggacatttcttcctgctaaccagtactgaagggcttgtttttttcgtaactttacacaaggggtactattggaaaatatagctttctcaagacatctgatgtcagtttcccattgttttgcttcacaaacatcaacaaagtaaacctgaacatgcttagcaatttccgaaagtgttctttgctgacattacttttgacatactgtgtcaaaattcttaaggtctcccctcctttggtaaagtaggcaaaaccttacaaggaaaacactataatacacggaaatatactgagttagatttccagtcacctgctctatggctctaagatgcactacatccataatggttcctaggactgtgtccacctgatggtttggagtacggaaaaccagcccctatggcttaagagtcatctcccatggaagacaatgctggccttctgaacgctggggctcatgggcttgttgatgtggctttctggtgtgccaggatctcctggcagctcctgtatacttcaatcaagcagtccagccggggcttggcactctgaattccaaaggggagaaatgcrgagtcaaggtgagaatataagggagtgcagtggtgctgcatccacttgcaaatttttttttttttttttttttgagacagagttttgctctgttgcccaggctggagtgcagtggcgcaatctcggctcactgcaacctccgcctcccaggttcaagtgattctcctgcttcagcctcccgagtagctgggattacaggtgctcgccaccacgcccagtggcacaatctcggctcactgaaacctctgcatcccgggttcaaatgattcttgtgcctcagcctcccaagtagctaggactacaggcacgaaccaccatgcccaactaatttttgtatttttagtagagacagggtttcaccatgttggccaggctgctcttgaactcctggccttaagtgatctgcccacctcggcttcccaaagtgctgggattacaggcttgagccatggtgccgggaccacatgcaacttcaatctctcacccacatcaaggggtataaatgacacagcagtgagctcatggagttaagaagtttaggcctcagcacaccttgctggaaagagtcccagctaggcttacagcacagcttgtgaactatgcgaggtgggagatcaaatgatagctttttaatctgtctaaatttcatgaactccacctctaagaataagcaagaggaaaaacaaaatggacccttgagaaatgtcacaagttgtaaaacagccctcaaacacaagaagtgcagtttaatatgtaaatattgaaaaatgttttacacaatgaaatgtaataaccaaaattaaaagaaaagccacagaatggaaaaaatatatgtgaaagtatatttaataaaagtgcactacctaaaatatataaagaattgttaaaaatatataaaaatagatacaaatacataatattcagattctacttgactaatagagaagataggtagtttaaaataagaggaaatactgataggtaatacaaggaaatatgaaaagcctatcatttaaagagatacaaatttaatgcctttacctacatattaagctaaaaaagctaaatccactattagccaggatggtagaaaaagaagtacaaaatccccaaagtatgataaagttgtccaatctctggagcccgatcttaaacactagaaatctataaaactattcataagctttaataaaataattttgaattacaatgcaaaataatttttggcttatcttaaatcctttgtgaaaaaggtcagtgaggcagggttaactgtatacataaatacatgcataaatacctacctctaaatttattattttgtaatttattatgtttgtataatttttgttttttgagatggggtctcttgtcacccaggctgaatacagtgccatgatcaaagctcactgcagccttgacctcctgggctcaagcaatcctcccacctcagcttccccagtagctgggaccacagatgtgcaccaccatgctcagctaattttggtattttttgtagagatgggggttttaccatgttgcccaggctggtctcgaactcctgagctcaagtgatctgcctgcctcagcctcccccacagtgttgggattacaggcatgagccactgcaccagctgataagtgtttttttttttttgtaagagcaaaacaaaaaaacccaggcatgattttaaaagctggcaagagtggctaaataaactgatatttcaatatattatacaattatttaaaataataaatataatggcctttgtaggatacatacatattaaattatttacaaagcaagacacacaatagtgtacaatgtaagatcaattacctctatctaaaaaaagtgtacagtagtagactgacagagtcaaagtagatgaatggtgatttataggcagaagttgctatatatttgattgtgttctttaaaatgtgcatgaggccaggtatgctggctcatgcttgtaatcccaacactttgggaggctgaggcaggagaattgcttgaactcaggagttcaagatcagcctaggcaacatggcaagacctcatctctactaaaaataaaaaaaaaaaattagccaggcgagatggtgcacacctgtagtcccaagttctcaggaggctgaggcaggaggatttcttgagcctgggaggtggaggctgcaatgagtggtgattgtcactgcactccagcctaggtgacaaagtgagactctgtctctaaaataaaataaaatgtgcatgaatatttttaaggaatacatttgcctcagagaggaacttctcaaataactgaaatcctaattatcactcaaaacagctgtcaggtatcttccaatactctgacaaaaggaatttacattcctaatgaaaaggttgaggagtaattggagaatggtaaaagtattctatgctcacctggaagacgggtactacttgggatatcccatgtggttccactggatctttcaataagatgcagaggtagtaaatcaccttctgctgtaagaaaataaatcaaatagcaaagtctaagtgaaactcattttgcattctttttttctttttcctttatttatttatttttgagacagagtctctctctgttgcccaagctgcagtgcagtggcgcaatctcggctcactgcaacctctacctcccaggttcaagcgattctcctgcctcagcctcccaagtagctgggattacaggcgctcgccaccatgcccggctaattttttgtatttttagtagagatggggtttcaccatgttggtcaggctggtctggaactcccgaccttaggtgatccgcctgccttggcctcccaaagtgctgggattacaggcgtgagccaccacacctggccacattctatttttctaagggaaggctcaacgctttttcacaaatgtttaagtagtagaacacttgatagcttttgaagtggaagaaaagtatattctcattctttaaatgaaaaaagacagggccaggcgtagtggctcaaacctgtaaactgaacacttggggaggccacagcaggaggatggcttgagcccaggaattcaagaccagcctaggcaacatagtgagactgcatctctgcaaaacatagaaaaaacgagccaagcatggtggtgcatgcctgtagtcccagctactcaggaggctgaggtgggagaatggcttgagcctgggaagttgaggctgcagtgagctgtgatcgagccactgcactccagcctgggcaacagagtgagaccctgtctcaaaaaaaaaaaaagaaaaaagatagaaagagaaggaaaaaatgccagtgataattttgaagttggtcttgaagataaagttgaaatgctaattccctatccatgaaaacctgctgcatctctttaaaaataaagagatttaccttttaaatataagtctcacttttatggttttagtttaaatctgggaacatcccatgggctggctacctcctccagagaggcctgtaatacttaccttttaaatacttaccatgtaaatggcctcattgatgacaatatccttgaccttgcccatttctatgaaggtagtgctttctttgcctgaagcataagatgaagtcatctgaatgccaagggaatcaatrattaacagagtctcctgatcaatcttcacaaaatggagataaccaagcagacctaagagggtgatgaagatggcagcagagaggatcatgctgttctgaagagagagccagacacagacagtaagattaccaagtggtaccagtcaactccaggcaatgaggggaacatgcatggaggaaaaggaaattgcttttatttgggttctaaggtgctatgaaagtatacagtgaaacagatccagacaacaaatggataggtctaggggaaacctccatcagcaaaatgtccatcacagcaatctcagaaatttttcttccaaaattccaactttagggcctaaatcagctgaacgcagtagcttgcacctgtaattccagctactagggaggctgaggcaggaggatcgtttgagcccaggagttcgaggctgcagtgagctatgatcatagaactgcactctagcttgggtaccagcataagacactgtctctaaaaatcgaaaggacccagccgagtgaggtggctcacgcctgtacccctagcactttgggaggccaaggcaggtggatcacaaggtcaagagatcgagaccatcctggccaacatggtgaaaccccatcactactaaaaatacaaaaagtagctgggcgtgttggcacgtgcctctagtcccagctactctggaggctgaggcaggagaatcgcttgaacctgggaggcggaggcggaggttgcagtgagccgagatcgcaccactgcactccagcctgatgacagagtgagacatctcaaaaaaaaaaaggaccccaaatcttttcctttcacactccctcagcagaatacaggagggagttatgtcctgataaacccattataagatgaaaatgcatttaatatttagttctagcactcaaataaaaaattaaaattaaaaaatgcatttaatatacctatcaagcatcagagcttagcctagcctaccttaaacgtgctcagaacacttacattaggccgggcgcggtggctcacgcctgtaatcccagcactttgggaggccgaggcgggcggatcacgaggtcaggagatcgagaccacggtgaaaccccgtctctactaaaaatactaaaagttagccgggcgtagtggcaggcacctgtagtcccagctactcgggaggctgaggcaggagaatggcgtgaacccaggaggtggagcttgcagtgagccgagatcgcgccactgcactccagcctgggtgacagagcgagactccgtctaaaaaaataaaaataaaaaaaataaaaaagaacacttacattagcctacagttgggcaaatcatgtaacacaaaatctgattttatagtaacgtgtggtaaatctcatataatttattcaatgctatacttaaagtgaaaaacaatgtttgtatgggtacttgaagtaccgttcctacttgaagtaccgttcctactgactttgtattgtttccgcatcatcctaaagtcaaaaaaatcctaagtcaaaccatcgtaagttgggaaccatctgtatatagtgcaaaatcatagactgaacaattataaagtgcttagcacagtgtagcagatactatggcttgcctaataaacagccacccaccagccccaattgaacagtgagtgaaccatgattggttccca

SEQ ID NO: 95002 - DNA, 56809 bp, Homo sapiens
gtggcccaagactatttttcttctgccaatgtggccgagggaagcaaaagattggacaaccctggtctagcccacaaccagcaaagcaataagtgaagccctcatctgtggtgtccgctgatcaagctaccaaagaaaactcactaaatgtggtattgggaagagatgtacaattacatatagggaatttccaccatgcagacacaatgcatgtaaattgcctaaagaacaaagacaatattaaaatgtattaacataatttggaagtgatgtttttatcacatactacctttgtttaaaatttatttcattggaagtttatctaacttaatttttatttctatttttatatttatttattgattgatttttgagatggagtctcaccttgtcacccaggctggagtgcaatggcgcaatctcagctcactgcaacctctgcctcctgggttcaagcaattctcctgcctcagcctcccaagtagctaggattacaggctcccgacaccacacctggctaatttttgtatttttagtagagacggggtttcaccatgttggccaggctgatctcaaactcctgatctcaggtgatccacccacctcagcctcccaaagtgctgggaatataggcatgagacactgcacccagcctatatcatttaatttttaataatgagtatttaacaaacagcaggcaaaatttctgaaaatttaataatctgctgtcatgagccagtataggccagctctccacaccacggactggaactaagttcagcactctttccactcctgctgcctttactaccagcatgtaaaagcaatgatgctcagtatcgtacgggggacaaacctgggtacccgtcattaatttctgtgaccctgggtagttactaccagatgcttagttttctcttctataaaggaggagattaagagtccttgccctgtctacctgcaagggtttttgagaggattaaactggttagtctgtatgatagtgctttgtaaactgcagagtcaggttcagataaaaggctttatgatgatgacaatttcattactgttttcaaccaggccaccattgttaaggatgcagtgtgtcgctgctttcaaaagtatggtttagtttgagatcttctgtaatgcccaggatagacagtaaacacccagaagaattgttctgaagaagcccactcaaatctgtgctagtctttacttagcacaaataggtacctatattgggatgaaaactatttatttgaagcttataattcactcttttctagctgctgctggattgtctgacgggtctttcctggagttatggaatacttctcaatttcaatagttgaataaaggtgtttttttttctgtcatgcaggctagggtgcaggggcatgatctcggcccactgcaacctccacctcctgagttccagtgattctcctgcctgcgattctcctgcctcagcttcccaagtagctgggattacaggcgtgtgccaccaggtgtggctaattttgtattttcagtagcgacggggtttccccatgttggccaggctggtcttgaactcctggcctcaagtgatccactcgctttggccttccaaagtgctgggattacaggtgtgagccactgcacccagactatttttaatttcaatttttaaaaaagttgctttgctttttgcaccagaccaactcaccaagttattttctatggattatacccgtgcacataatgtagtttcctgattataaattaaatatccctaatgtccacgttgaaacactctcgaaacttaaatgaccataaactatttgccttgagtttgctgaacttgtctttgggctgtaagaaactcttttctgccaagctcttttccacatcaggccctttgcccatgctgacccctctacctggaaagttctcccctgattatgaagctgactccttctcatcctttagatcaaatgctgccttcttagagaggtctgcactgaacacctgtttcaagtcgtctcccggatctgtttccttatttattttcttcacagcatggataacagtatgcaatttcctttctatctgctgacttatttgtctatgcctcttattattatgttggctctttgtgggcagggcttgcccattgatgtcattatctacctccagtgtcccacacagtgcttggtgcacaatagctatctcatgaacagatgaacttatctgacaagatccactctagtattgtaaggctgtggccatatatggctatcttgaggtgaaagcctaccctaaagactgtccaggacttggcctctggtgctcacagttgcccaggtttctctcaggtcgcaggatgagccacagtggtagcataagactgctggctgctcccctctgcccctccctaatggggctgcccagtgatgtcacacaggacaggattctctaatccttttgattctgtaacagtcctctaagcagctaagtttctcataatgtattatgatgtaggggagggaggaaggagggccagggtaggcggcacaccctctccctgaatgaaattcatttaggggcactgtctgctcgcatgttctgttctgggagaaaatgggtagcagaagctacaatttgtactaagctaatgaaaagagagaaaagaagaatggggaagagaagggcaaagaaggcaaaaagagaagagaagaaaaagggaggagagagaaggagaaatgagaaaagaggaaaccaaatgaagaggatgtgtgagagaaaaaaatatgaaacaggtagtgagggaggaaggaattgttgaacctatgttctggttggctttctaactcttgagtagtgactggcttcagtggaaaaggatggtgaggggtattctcaaatactagcctcctgagggggtcatttacattactgcatatattttgagaggcccaggcaagtctgcctcaagggtgactctcctggagagtaatttgggagcaggaatgtaaacctttttttaagtcacaattgtggtggaaagggaaagagagtattgctgatcagattaagctttagactccacactacagcccctgtcctcaccccaagcctcccaattactaggctatcaacacacactaaattcaggactttaaagccaatcttgtagataatctttttctttgttaattgaaatataaacagatttccaaagcagagcaggatagttttataatatacctataaaaattactaaaatgtcatcatcatggcaatatattcccactaaaatcttactgtgaacatcccaaatatgtgtagaggcccggcaaagtcttacagttcagaagagaactttcaatcctcttttttcaatgttattttccccttctatctgtccccccttcttagcataaggtttaataaaaggggatatgatgatattaaacatatttaatcagacaatattgatatctttttaaaatattaatcttataacccatgagtttcctagttcataccaaaatgtccctgcaagctgtattcagaaataaatagtaggaaggtgctgctttatcggcagtctgtacaatgcgtagactccttaaaaatttctttctgttcatattttctatttctctccctcttcttctacaattgacccagattctccaagtgcagaacagagagaagaaaggtgtggaagcctaaaggaaggaagcagaaagataggcaggcatttcaagttttctatggtccactaccgtcactagtgacccagcttctgcttataaataagaaaatttgtcttttaagagcactctaaatggttgccatatgagcttttgtagttcagaatgttaatgagtccaccagcatgctactcatgctgttacttgcctggagtattaaggattccaagaaggtagcgtttcaaagatctctgatctaatttctttttttggggggtcggggagatatgtggagaattaggaaatgtatcctcagatgatactgagaccaaatgcatagtgaattttatttttattttgtatatgtggaaatgatccacgatcatcttctaaggaattctggccgggaacagtggctcacgactgtaatcccagcactttgggaggccgaggagggtggatcacgaggtcaggaaaccgagaccatcctggccaacacggtgaaaccctgtctgaactaaaaatacaaaaaaattagccaggcgtggtggcaggcgcctgtagtcccagctactcgggaggctgaggcaggagaatggcatgaacccgggaggcggagcttgcagtgagccgagattgtgccactgtactagcctggatgaaagagcgagactctgtctcaaaaaaaaaaaaaaaaaaaaaaaaaaaagtgaaggaaacagaaccttccccaaagtcatgttgagaaaattagagatggctttttacaactttaaaagcagcagctaaatatttgctgaatgccagaaagaataaataggttgcttttgatctaagagttggggcaacaaaatggtttaggagatagaaagtagtagggtgcaaattgctatagtgagctcctcaagtaaaatagagaggccttcaacataaatttaccttttttactggccagaactcaatttggccagtaaaagaacctgccttctacaatgaagtctttggtttgtgtgtgcatcagaacatcttttaaaaatacggacttttcttctaacttcttttcctgcgaatgtggtgtaggtcaaattcgtgaactggttaagccgctgacaagagagggaagggcaccccagccaatgggaacccgtgctggtgatgtactgctcctaggctgcgattcattggctgcctagggtttgtcattctatccccggcgtctgcaagcagcgtgggtcgggttttccagctagctaaactggattttggccgctggcacgtgcagtttctattaactttagctcatctctacctcttaatagaagcagctgttatgtttctgattattctcctgattttgaaaaatcctgttcccttaacctacctcattggaggtcgttggaggtcccctgggacagaaccacgtgattatctaacatgtgcaaataaatacaatgtggaatcccctgaactatagagggaaaacctgccagaaactcagagcatgtgccccgtgcgtgaatcagttgcactcgcacattggtgggcggtggtagcgtgcttgtgtctctgccctttgggtcgcgaggtgtgtggccgtggcacctgcttgggcttcctggggtcactgggagaggaaggctctggaggagtgggactctggggtaggggggtctggcagctgcctgggacccaccatgggttcgaagggcagcggccagaccgcgacggcgcccaagaagggtggacagcttcgggtctgtgctcggggctgcgtgtacaccatcttcgcagggagtggggtttgtatctgcaggcaggtagaagagccagggctccgggcgcggacgccgtaggggtagcttccgagtccctacttggccaagggccggcacggaggggctgtcgatctactgggcacctaatagccgcacattctgtccagtccctggcgccggaacgtgaaggcccgggtcctggctgctatccgggatccggacgctcccttcggcttcggcctggtgctccaggccgtaaggcaaaggcggcggcagcagcagcggcagagaaagaagctgggtaaggcagtgacgtcatctgtggcggcccctcccccgcccgccagccctcaccgcagttcctgcccaacgacatccgggtctctgtagctgcgcgccgcgccgcagctgtagcggcggcggagccagcggggcggggcgagcggaggggtgggggaggggcgacgcggtcgtgagcgcgcctgcgcggggccgcgctagaggcggcggcggcggcggtggcggcgctagggacgggagcgcgcgcgggagctagagagcagtggtctcggcgctsgtccggcccgcagcttcgggtcctcaggcggctgttgctccggaacgggtggttggggaggggggggtggggggactctagacagctgaggcgcgaaagcgatgagtcctcggctcttcctcctccttctccgggacccgctctctgcctccctctccaacgcccggatgatctgagccgcgagggcgccgacagccgggggcccggacgcagcccggctcctcccctcctccgccccttccccagcctgacctggcccgccgctgcagcggtgacccctcccccggctgccgccgtcgccgccgcggtgaccccctccccggctgccgccgccgccgcctcggccgaccagggacctgcccgcctgcggctgctccgggtaagtgcggcgctcgggccgacggcgggctggcgggcggtgcgggcctgcgcggcggcggcggcgggcaggcctggggcctgtaaacaagccgggcgtctgcccgggcgctcccgggaggagacgcgacaactccaccccctggccggcctcctcccccgagccgggcggcggacggcgaggggttaacgctcggcgagggcggtggcggggaggcgggggcggggtgttagttgcggtggcgcggggagggggcgcgaccctctggccgtccgcggccgagatgggtgtttgtggcggcgaagcaggcgacggccgcaggccggcctggccggagagcggcctgcagaacttttcccgagcggggagggggcgtccccgcgcccccacccgctcgggcgcgccgccccggctgtcctgggcttcagcccctgggagggaggcggggagacttcctttgaaccgggcttagcctcgaaaaacctaattctgtagaaattgcttaaggttttacagggggcagggctgagagactccttcagaactcaagtcagtgagtgatgcctctagttcattcattattaaggcatcgaacaaatccattgaagtaaattccgatttcttatccttttaactacgtaaatcgggtaaaacttcttgatgttagagcttggttgaggtatggttctgttctgcttgtagattttaaataaacttggagccttttcttgaaagacagctggctgtggagagccttctaccaactgcagttttagatacgttttgaaaatttcatcacctgaggtatttttcttctctcctgaaacaccacatggtacaaatccacaaaagtcatgcttcagttgtccaagccatgggatctgtgtgctagccccacctccccgcaagtttcctgctcattggaataatgagctgaatgtgttttaagaagtggttggaagagtatgagagataggtatcattttctcaaaggaaatgattttgacattattgagagaaattagacattttaacaattgttttgtaaaacagtcttttcaaacttgcacgttggrgttttaaacacaaccactttacatgtgttgcgctccgaaaagtggagggatttgttgaaacactactctgctgagacttagggttccagagcacttgggaatttagcatagcttggtccccaactctctttgaaacactttacttttatacttttatcttgctacatattgggccttttccaaagattgtatttctgtaactccttattttacaaatgagaaaattgaaaataaggagattctctattcttagatgctgcttttactgacttaatgctttctttaccaataaataatttgaagcacaaagtaacatttcctagtgttatagttttgttcttgttatgtgtaacttatatgtatctgattaaactttcagtcatgtaaggatgattacttttaacctggaagtttacagcagtaccacattattgaaactataatgaacttcctgcacatggcagttgcctaagacattttaatttgatatcataaaacatttttagatcggtgaagtaattatattatgggaaaggtgtattaagactgataatgtttgaagttaactacctcaattatatttgagaaataatagtcatcaaattgctttttatttggcttgtatctttttatgtattttgtgtacatattgtatctttttacatgaggggctgaggtatatgacctgttgaagggaacagtgcagtaggagacaaggattgtttagtcatggctgtgctccaaaatatctgtgtccatggacaagtcctttaaccttttgagtttcagcttccaaatcagtaargccagttgggcagattatattatcacatgtactgtccagttactacatttaaaaatttttttttatcaatattgtgtgtctagtcaacataccgttgccaaataaatgcctgttatgtgtcaggcacttagatgtttcagtgttctaaggctggatttctttctcggttctgttttatttaacaaattctaagttggtgatggttctttagaaaagctgttcttgtgttcttgtaagctattgatttttcttttgggattgggatgtgtagggaaactcttgagaggaaggaggatggagatttcatgggagacaaagggtggttgagactacaggtttgaacaagcacaggacccttggtagtctgatgtgaaggacattataaaaacacattatgaaggttttttctgtcacttcaagctgggtcttgttaaacctttgaaaattctctaatacctcatttgtttttgaaagaaatctatagcaacatcattttgtcatgtggtaaatattgctgagcagtcactaaatacctatagtcttttagtttgttcagattacatctaggccatttgtttactctaatagctaatagaatgtacagctgattttggtttaactgtgcgtgcatatttgtaatttttaaccaagaagtggcatatgtccacaaggaacttgttatctctgaaatactcacccatgagagctggattaattttttaagatgtaaatctatgctcatgtagaaataatataacaaggtgatattttgatgatcctctcaaatgattatctaactcttgcctgggcacctgactctgagtcagtatactcttgaatactttccatccttaatcaaatcaggagaaagagatggccatgtaagaaaattggccacggcagggttttataagagttaagcaagaagataaaacaacacatggccctgtgaaatatataaaccttggagaagaggagaaggtatagtgaggcaactgggtaaaagttgtgtcttcctctaagtaattttatgtcacaatatgtcctgtcttccatctcaaataacaaattttaaaattaagttgtgtttgttattttgctattagccaagatatataaattaactgacctgggattattagccatttgtatatgaaataaacttgggttaacctatatcaaaatcaaaagattgattatattctttacccttcactctttcaaatgtcttatgttctccatattacgtaacaattttatacttcattctgagtctccagaatatattctttgatgattttgacctttgaatgtcctggctatccatgtactacctagataatctcgttaccaggcttttcttttgctgaggcaggtcagagctagagaaagtaagcaattgagagaggcaagtttctgtatacctgtatctaaaatgtaatagactttataatttttgtaaggaactgaggaaaggtacaggcttttaatgtgtatcagtaaactagactcttatacagtttttataatattagagatgttttaagcttccttgagtaaatatgtgataaaggggggatcttgagtttttataattcttaatatgtttatttggaatccattgaccaagtgtatgtagtatccatatttaagatctggattaaaagtgattagtttctgtggctgatacgatttagaattaagatcttttgagactaaactacttctagatacagaagaacgtcatgaaagccgtactttcttggccatttatttgtgttaggctttaattttttgccataaccctctaaaatatgtgatgttatcttcattttataaataaggaaatacagggtcagagaacctaaataacgtgccaggatcagatctgggtagatataaaagtatttttcaagatattactgagtggatttttcccaattagatgaacctccttattaccaggaaccaaaatttcaaaagctaaacattaacacttacgattcatagattcctagagttaagcaagtccatgttagtttatgtaaagtcttccaatgcaagactaatgttttcttctaaaacattcagaaaagatttaagaaattaagttcattttctcattcccaaagtttcagaagttaacaaagctaaacattttatgtcttcaagtaccattgtttaggttaaggaatggaatccatgttaattctcaagtggttgatatccttaatgaaggatctagggaaatgtttctgaacagatgtaatcagtagagccacattgaagggccccgtggtggacatggtgataaaactaacctttgaaagaaaggacagtttgagtccctgttctcctatttcgtagccaggtgttcctgggtaagctacttgatttcttaaacctgtttttttttatgtcaagtggaaatacttttgtcgtaaggttatcttgaagatttaatgaaataattatataaagcatttgagatcttttctaccatgaagaaagtgccaaataaatggtagctgttattattgagtatatgaaatcttgagatacttaggggtatagagacttgcttagtatgagagggttgtctttcagtatagcttttgcagtgtgcctggaagccaaactagagattgagtagagaatttagaagacattgtaaactctgtgagtttagagagcttgcatttgaatagactaaaagttatagaagaaagagaaagttgagtatgagtagctttatttggctctgcaaagctggcaagatgtcaagggtttggagttaatgattaggtgggagtagatggttaaattgcggataaagagtaacagtaataaagcaaaggtgaatgttcaggctagaatgatcagtcagtaaggaaggacaagggttggtattttgaagaggagttacagtttatggttagaaatgagcaggaagatatcattgctacaggaaaggatgcaaaagagtaaggaaactaaatcattctgattaactcagttattaccattttttaaaaatggagtctttataaaaggcgttaaggctttatatgtgagttctaggttaagtctgaaaaattgtcttggaatagtgtgggtcttactactgcagacccaaaccaagatattagcattccaactggtctctttcctgctagcatcttgtactgcatctcctccctgattctataaaccatcaaaattctttctaaactatggtttttcattatatcatttctctcagtatacttcagtgactcccatttacctctggaataaagttcagaattcttggtttggcttttgacactttccatgattggacctcaagacattagtctgttataaccaaactagtacacttgctatctctggaacacgctcttttctctccatggatctttgctcatgctagtgtgcagtctggaatttgtgtctttccttctccagctttggttttctcttttagcaaagctcatttctaatatttcttcttccacaaagtcatctctgacccccagagtgtttaatctctcctttctctgtacttaaagcaatgtctgtgtattatttctatcatatgttttttttttttttgttttgttttgtttttgagacagagtctcgctctgtcgcccaggctggagtgcagtggcgcgatctcggctcactgcaagctccgcctcccgggttcacgccattctcctgcctcagcctcccgagtagctgggactacaggcgcccgctaccacgcccggctaattttttgtatttttagtagagacggggtttcaccgtgttagccaggatggtctcgatctcctgacctcgtgatccgcccgcctcggcctcccaaagtgctgggattacaggcgtgagccaccgcgcccggcctatcatatgttttacctttagatatttgtgtctaaattataattgcattcagttaattctaaagggaaaaataaatttttactttacacaaaggctagcggctagcacagtgctttatggatagtagacattcagatatttggtaagtattaagcaaaatctacctggagtgaaagtgattgttgtaggaggaggtagtagaagtagttacaagctttatcgtagcagacgtttctgactctcttcctgaatgttattttttctgaacctggatatttaagtgtgaagattatacaaatctgaagtgtggcagtgttcttatattgatgtagaagactaggttgactgatcctggacctacaagcttcattttaacttcctacattttggctttgagggttaacaggacatttataatcacatatctcttttcagagtattttacatttgcaaatattatcatgaactttgtgtccttttaaccagagaggaattgtggaatcacaggaattagatgatgtgttaaagaagagagataactatcagctgatttaatttgaacccaacaagtatctaataatatgcatactctgtgttcaaataaacctctaagctagactttcaagcttatcaaaatgctagactattttcagtgtttagaaaataccagccaggtgtggtggcttatgcctgtaatcccagcactttgggaggctgaggcaggtgaatcacaaggtcaggagatggagaccatcctggccaacatggtgaaactttgtctctactaaaatacaaaaaattagccaggcgtggtggcacgggcatggtggccacccgcctgtagtcccagctacccaggaggctgagcaggggaattgcttgaacccgggaggcacaggttgcagtgagccaagattgcatcactgcattctagcctggcaacagagcaagacatcgtctaaaaaaaaagaagaagaaaaaagaaaatacatagtaaaatttattggctttttaaatggataatttcatatagtcagtcagtgccggcttagatccatttgttagagaacaatgctaaygagacctcttgatactttgtgttcctcttatgttttcctagccttgacgttagcaactaacaatgataactaacattattgagctcttatgtgccagrgactattacaatagattttcaattattatctcattaaatcttcatagcagccctatgagctagatactgttactacctatatcttaacagatgaggaaatttgaaacagagcagttatttgccaagagtttcagagctattaacagaagcctaatacaygttcttggactttgcagaaataatttgttgatccatgcggtttcattgctactgcggaaagtaagtctcttggccattgtgatgggtcaaaatctttgtacatgaagggtatgactgttgttccattgtatccagagagtgaatcttgtgattgagttgggatttgaggtggcagtgtatactaagtttgaaaagtatattatcatatgttagctccctttagaaattttccccaagaagagctattacattttttaatattaaaaaagcataagatatggccataatacaattagttccacaagccatacacacttttttcttatggcttaaaattttattcatgtttactactttgcaacccactgatataaattatttcacagatcctttattcaaatgaaattctcagtgagtctgagaagatagtcttaaacacaagctagctgagtttacaatagagattatactataaatggtaacttcaatgtttattgaaaataaattccttaaaaacaggtcttgtttcattcatttaaagagattatcaatatatgactgttaaatttttatagtctccctgttcattttctgatgaacacatgacagaaaattgaatgtgagctggaaatacagcagactatgagaaagcatgggtcatgtataatcactttaaatttaggctggtgttttgtattcatctataatatgaccacctcagggagggatgtaagtaaacattctttttttagttatactttaggtggcttaattattttaaagaatatgttattcaagaattgtctattgtactgttttaaagaataagaatataattcattaccaactttgaatgtcttggattcttagtactacctttttctttatcatgactagtaggatcacatcataatttggtactgtgtgtataaagatgaagtgtgcttacctttattaccaaaattcagaaatgaaaatgtgaatgataaaagataagggatggctatatatttttttgtttttgtttttccaaacagaatctcataacttaccaggctttagaaaaacatctttgcagtatgccatcatacctcagaatgttaagtagataggaaataaaattttcactttttgtaaagcagtagggtattatcctttctgacagcctgtaagactgttttggttgccaaggggccaatcttagaagtggcagtttttgttttgtgaccaacccacagcttaccctttgttagtccatatctgtcatcttcattttctctttctgcgtaaatgcttcttgatacagtaagcaggtgtttcaactagtcagccatctagtgtgatcttttctggtttgctacagtcagtaaaataagtagctctataagtgtaaatagtattacttgttttatgtagtaaaactccaagattaagttagagatatttttggctagactacattgaatgcattgacaatggatttcccagctcccagaaattcgtttgtgtctgaattactttatacttggcttcttgtgtagagaaaactttagaaaaagttcatccatccatgaatgttgaatgaatgagcagattaataaataaatagctcagggaaagaaaatgtgtgggcttttagtcataactatgttttttctcttttgttcccttccttatgtgccatttttcaataatgggagtgtgtatctaatgatgttgataaactgtttaaagtcattgatgaacagtaatctgaaaatcaagttttgattaagccgtagatttcttttagggtccaatattttctttttagaaatccactatgatatttttgtagggataaaagacaaccatgtattctatagatggaaaatggtaggatacagtttgttggccggccaacttctctgaaaatactttttcctgcatagaagataatcagtgttgacaagggagaagccaaggtataatggctgttattcatctgtctcatgtattcgtcaagtgtcatgtgttaaatatgaacaaaaaagacataatctctttcctcctggatcttaaaatctaaagtgagagataattcaccagataaatgctgcgataagggaaatagaggattctatgagcttatgactaaggatagatctgtttcctcagatgtggaactaagaagtggcagtagttgagaagttcattttgggccatgcgatttgaggtgtggctattcaagtataggaggtaggtggttacacattttttaagctattaaatagaactttcacttgaaaaggtttttttctctctttcctcagcatctatctccctacayacacaaaaaaattgcatgtcacaattcatgaactcagtgagtgactctattttgaaaaatgttagattatatcaactgaagtctgttagaggcaaatgcttttggtcatttttttcagcagggacatttcatatgtgtaaaatatttagaatccccatgtatttatatataaatgaatcttttaccatcttaaatgtttaataagttatatttttcctttctttcaacttaagtatacaaggttatcagcaaacatttgtagatgctctatgtgaggtgttttgtttattagttttaaggaagagaaaaaaggatggattggatcaggaagtcagttattgttttctgggttagtttgagtccaaatcctcaaatatgcggcgatttataagtagcaaactaggaatttaatccacttcagttttggataacttggataagacactttctgtctatagatctgtctatagataacttggataagacaagttatccaaaactgataaatctgaattagttaacagatgaggcaaattgagattgtaaatgctaaaagattattagaaaactttataaactaaatagttctatgccatgtctttttagtattttgcttgtactataattgtagtgaaaataggtcagtatctaatttttatagtcactagagctctccaactaaatttagcttagatgtttttctagcaattatatacttacaaagtttacttttaaaaattgtgtaatacatgcctttatagaaatttaagaaaacgacttatggattatgtacttcagatcacagcacaactagaagatgttgatacattacataaaaaatcaggaaacctatgaagaacatcaaaagtggcaaggtgtgttcacttgcactttgtgagattgaaactgctgccattatctgtgcaaactatggtttgagtacttttaatttagcaaagactaattattttttaaaaattttggggtaaaaaaaatggtctttagcgtagaagagctttacccgacttactttagttggttcaattggttgattttggtttgctttttgaaaytttgtattgtcttaatttggggcacattgaactcaataacagttcagttgcattataattcatttgggtaaagtttattgttggaggagggtaagtaaatatttaactgaaaaagtgaagtaaatatttatttaaggctataagttgaaatatttgtcagctgagaaattttcaggtaacttttttaacctttgaaaaaaatttactatagcatgagtattttttatactgctatgtataatccatagtcacgttttttaacctttttatataaaatactgatacagaaaaccatacaatcatagtaatcttttaaaattgctttataattcacatagcgtaacattcacccatttaaagtttacagttcagtagtctttagtatattcagacttatgcaacgattaacacaatttaattttagaacattttcatcacctccaaaagataccctgtactcattagcagtcactccccattcaccagtctcccagcccttatcaaccattaatccattttctgtctatagatttgtctagtttaggtattttatataaatggaatacaggtaactttttattagtgatttttcacttacatgtgtcttgcatgtctcatgagatagctatgaataagttagccttcttttacaacttaaataacaattcttgtctgaccgggaaaaagtattaagttattgagagactgcatcccaatttaaaccaagaaccagactccttactagtattataactcaaaagaatgtgtaccattagcccttacctctggtggtgcttttcactgtgaattgttcagcagcctctcaacttcccgaaaataccacttaagtcttaaactcagacttgcatgagtttactgagatatgtttacctttgcagctggcttgcctagagtctaccttcttactaccctactaagtccagaatgaggaagaattaaaagcaagaaaggagatacagaagaagagattgctcaggctgaggaggggcaaagtgataagagcaggattagaaagagacattaaaaattcaaggatactgagtttgttggcatcagaataaatcttggaggctgttttaagagrgaataaaacctagagggaaggaataaaaggcaaagatgttataaaacataggtaaaatatttaaaatattttgtcctgaattttgaattttaggcatatgtcagtgaagcacaaaggatagcccccttttttgatgagctttagtatccttaagatattttctttctagaaccttgtgtaggaattttacagctgaccataatcatgtgttctctttggtttgttccaacatctttggattggaaccagtacagagtaggaaacccatatcaccttgggattatttttcagataaatcttccagaggattaaatggcaccatccccgtcaggtccaagtaggaggggaagaatcctattttgggtgctgtcagattcagtgggctgtttagttcactttttatccagaaaatggagctaaatgagaaattgcagcttccaaagaaaatcataccttgattttatagatcaaagcctttctgattagatcagaattgttcctgagattttaggggcattcagttaaagtgccccaagaagagtgataaatcacatataggtgtaaagtcaataaagtcctatagtaagcagactggaatttagggggaggggaatacacactgttagactgttggtacctatatttgactactaggatgattatatattttaaattctgtattcagtttcttatcagaaatactgcctacaatatcttatacttaattttttaaggaacaggtgataaagataggttatattttcttcagaataattgatattcattatttaatagataaaatgtgttatctgaatgtttatagtagtagaaaccaagtttacaaaatgtctatatataatttgtttttaataaccaaggattctttctttacaaaagatttcctctatataaatcttcctgttttatagatgatctgtattataggagaaatgagtatttgttgatttaactggctaatctacaggactgagcattattagaggagtatttaaacatagaagtctgtgaaaatatttttagtgctgagggaaattggagggactttctagaaccgcaaactaatagaaaaccaggcatagtggctcaagcctgtaatcccagcattttgggaagccgaggcgggaggattgctgaagccctggagtttgagaccagccagggcaacacagtgataccttgtctctacaaaaaaatttttaaaattagctggacgtggtggcacatctatactcccagctacttgggaggctgagacgagaggatcacctgagcccaggagctccacgctatagtttgagttgtgatcgtgccattgcactatagcctgggtgacagagcaacaccctacctcaaacaaacaaacaacaaaaaaacccttctacctctgaacatgtggggatttaaagattgctatgatttaaatataaatcatgaatatagaaaatatgagaacagaagagtatttgttaaacaagactaagctgtgctgcataaagtaaggcactatcattgtgctggtattttctgattctcttartgcaataaatgttaaactttactactaccttagccatgttgcagggaattgacatgaatagttcctgggttttggctgggtgcggtggctcacgcctgtaatcctagcactttgggaggcttaggtgggcagatcaggagttcaagaccagcccggccaacatggcgaaaccctatctctaataaaaaacttaaaaattagccgaacgtggtggtgcacgcctgtagtcccatctactcaggaggccgaggcaggagaattgcttgaacctgggaggtggaggttgcagtaagccaagatggcaccactgctcctagcctgggtgacagagggagactccgtctcaaaaaaaaaagttcctgggcttcaagggcactctaatgtgcacatcttaaattcttagagcctacttctatggacgatttatgttactgttgatggagaatttgattttcttttttatcttcccctttcccttggcctttgtaggttttttgaagtgaacatacttttatgtatttacttatttattgagcagttcccaaatggcaactttattattttatttcttcaactcagttgtctagtttacttcatttgtatctaatctatttaactcatcctttgagtttttaatatcaacattttaaattttatttttttagcttcaaaggtgtgcatatgcttgttacatggatatagcatgtataatggtggaggttgggcttctagtgtacccatcacccaaatactgaaggttggacccaataggtagtttttcaaccctcaccctctcccacccaattgtttttatttctgaaagtaatatttctttcttggtctgcctgataatttttttatagtttcttatttttcgttagttttcaaaaaataccttgttgggcattttgtccatagatgtactatcttatgtttgctaattccaatatcggaagtccttaggaagttgtacttaaggtagtttgtttctttctgtatttggtgattttttttatgagctaatatttgattaaaccgaatatttctccatcctctgtatagttgcctacaatgtaatttctacttttttttttttagcataaaagagtttcattttcctttttatactcaataacttgtttaattagccagtatttttaccagtttctttacttattgttccttgcatcttctctgagtccacttttcttcttgctgaagtacatcctttagtaatccttttagtaagaggctggcttgtaaatgtccttagtttttgtgtgaaagtatattttatgcattactttgtttttcagctagatagggaattcttggttgataggtttcctcccatcagcaacctcagtatattatttcattgtcttgtgaaacttggcaaacttggatctctgagaagttcgatctctgcctaattgttatgcttctgtatrtaattttttttttctggtagttttttaaaagatttcttttctttattctgtcaccactacttactgtgtgaccttgggcaagttcaaaatggatataaaattgtatctgtgtcatagggttgtaatgaggattaagttttaaagcacttagaacagagccttgcatattataactgtgacatgttaatatttgttttattttgccatacttgatattctaaacacatttctatgatatgcttaagtatgttgttttatccatagctcctctttgaaatacattgttgatgggaagattcatatctttctttgtttctagaaaattccttagccttcatatctttgaatattcattttccaatattccttcttagtctctgtattatgttctaggtggttcctcagtatcattttctaatttactaattcacactttgactttgtccagctagagtttatgtggcctcagttccagtgaattttttttaaatattcaggctgtctctctaatagccacctattctggtttgatttctgcctatttttaatttttcttcctttaatgactattgtggcttccttttaacatttgaaattattttcagattgtcattttttcttctagaatgaattacagttgttgattttattggctgtccatcttagtttagttttctttgtgtgttttgagtttgcttttgcagtctcctattgactggaagtttttgttgtgttttctttttcactcttcttatccagtgtttttacatgcacctacatctctgtctaaaaccacatctttatattggaggcttgattcccttgattcttggtaacatcaggatcaggcttctctttccaagaataagacacaaactaagatctatatttcttctcactggacacataatttcatctaaaccgtagccccatgcaatggttagtagtagctttttctggctcctttcattggttggaagagcctctccaccctaggtattggtttcaagcagtgagcctgagttctatcccagccatgcatgggtacctttttagtccctgttactatccctacaggatgtggacttttggccatctctgttacttgagcccagaaggctcacagttttagcttcaaaaactgctttgtatttaaagagttcagtggcttggtcttttttaatattttgtttgtatagttaataaatatttaacatacattaaaatgtttggaacagatacatttcaaaagtgaatatacaaatccatttggttggaagttagtccattttgtgttgctatcacagaatatcacagactgggtaatttattaataatagaagtttatatagctcttggttctgagggtggtaagtctaagattgaggggctgcgtctggtgagggccttcttgccagatggaaggcaggaatgcaagagagcacaagtgcaaacaagggcaagacggggccagactcgattttaccaggaactcactcctaagataagggcattactcaattcatgagggcagagccttcatcacccagttactttttatggactcaytggttattactgtcacaatgacarttcaatttcaacatgagttttggaggtgacattcaaatcatagcagaagtcaatgtttaaaatcaatgtatatcctacatacccttcagaaagatactagttgactctcctacttatgagaggtatatttttttattcctttgccaatattgggtgtaataattttttaatctttgagaaggtaatgtataaaaaacaaatttgtgtttaatagctagcaggattggtcattgctccatatatttattacccatttatattcttttatttatttaattgcctgttcacattcattgcccatttcttttcctttaaggtgttcatttttattgtcttttaaaatagctgtttgtatattgtagtaatgttaacttttgtgtatatattgcagatgcttaaaagacgtttgcttttcaggttaatgagctttattttatagtgtaggagtttcttttctctggagtcactttttcttattcctttggaatcagtcttttcttgtcatccttagaaagtcctttcctaccataagattacagaaatatttgcatacatctactggtattgttttattattaatacttcagacttcaatctttaatctcttggtatttattttaaggtgtgatgttgaagggattcagctacccaccactggagggcaggagtggaaaagatcagctttcaggcacccattattgaatctctctgttcccagagagctctttctggattctcagttctattccactgataaatttattcctgcattagtattgcctcttaaatactataatttggaatcaagtttaaatatcaggtattgcagattctcatgattttaagaatgttttggctattcacatttattcatatatattttgaaatgatttaatcaaggtctgggaacaaaaaggtccagttgtgattatattgaatttatagattaaataaagggaggataaccatcttcacaattttgaatcttcctatccaagaaaaagaagtgtgtgttattctgaagccctcttcttaaaaaggttctatttcttgttatttatttagatatacttttatttctgttttaactttctaagtgattactgttaatcattttcatatatggttttctatagtcaaataatcttattgagtatttttttccctatcatttcaggttttgagtttgccatcatgtcattaactgcaaatagttgatctccttataattttatgcctctttttgttagccttggcttatctcaataaccattatttctacacattgctgagttacagggataagagttggtgtccttgttcttttttctttcctgggaattgttctagtactgagatttcctctttggcttgaagtaagtattatattaaggaataaattttatcaaatccctttcagaatatgatgagatgatcatatggattgtttttaacttttaaaaagatgacttacattagtcagctgcctaatgttggctcattgttacgttcctaaaatgatccctatttggtgatttgtaatatatattttactgaytttttggcatctgtattaataagtatgtttggactatagttttatttttttagtgctgtctttgtcaaattttatagaaggattatgataggtttgtaaaaagaattggaaatttttttcctgtaatctatagataacttaggtaatttgagagttacatgtttccttagggcttgaaggatcttgttttgaaatagtcttgcctgatgcacttttatttttaatagcttattttgagaacaatccaaatttaaaatttgcaaaaataatacagtgaacttccatatttatttaaatggccaattgttaacatttttccacattagttttacagacttttttccctgtgtatgtgcatatatgtattcatattctcttggcatgcacacacacattttgttattttttagttttgctgaaccatttaagactcagtatggacatcatgaacctttactcttaaatatttaaatgtgtgtcccctaagaacaaggactatcactttctcttacataaccatagttcaattatcaaatttaggaaatttaacattcatacaatactattatctaatatacaatccatagtcagattttatcagttgtcccagtaatgtcctttataacaatcttcccctccccattccttcaccctttgccttcatccaagccagtccataatcacatattacagtttgttgtgacctccttggtctcctttaacctggagtggttctttagtctttttgcattttgtttttcatgagctctgaagttttttgagggatagttctttaataactttctcatattgttccaggtttctggtcttcactctagcactaattgaaaaaaaaaaaatttgttttccgagaactgttactttcctccatattttcaaatttattaacagagaattgtacagagtgatttattttacaacaataaaattctatttgtgaggtgagtatagcctgtttggcttctaattttaaataatttttttagttagactatttagtggcttacctattttatttttttcacatataacatgtactataattttacgtaatatattccttcagcttttattttattttgtatgtgtgtgtggttcatttttctttttaggttgaatatttagtatactgattttctttagtatactggtttttttaactaagtgtgaatttttttttttctattttcaacacactattgctggcttaaaggtgaggtttcttaataaggtttggtcacatctcagaatttgataggagatttttctcattattgtttctaaatattctataattgtagaaatatgtaaactcaatgcaaaaaactggtgtaggagcttactttttaagcaatttccacgtttgaggttttcttctttctttacacattatcaatatctactattaatgtataattcagatgtgtcatttcattatttcattttcttttttttttttttggtctgtggggtaggatgggggagtgtgttagaaatctataagcttttctttccaacatataatccaataattatttgatttttcaattaatgttttaagtgtgtttgaacagaatatatagtcttgaaattttggaccacatcttttaccaatttaaaacatggctcttattctgtttattgctttattccttgtgatttactttgtctgaaattgaaattgcaattcttggtatcttttttgcctagtgtatttcgaccacaacaaagtacttttatactgacatctttatttttgagtttcttggttttgattagtctcttgattgcatgaatctatctttaaatagtttattttttcagaaatgaaacatggataacactactttagtgctggcatatttgatcatgtcttcttcatgtcttcttattgcgtttacatataaatgacaaccttgctggtcgtagtattcttggaataaaacctctttatcctcaacgtttataggcattacttcgttgcctatcatctgatgttgcaaagaagtctgggaccagcctgatttcttttttctttttcttttttggcatgtttattttattttttttatttgagacagtcttgctctgtcacccaggctggagtgcaatggtgcgatctaggctcactgcagcctccgcctcctgggttcaagtgattctcctacctcaacctcccgagtagctgggattacaggcgtgcgttattatgcccggctaatttttatatttttagtagagatggggttttgtcatgttggccaggctgatctcaaactcctgacctcaggtgatcctcctgccttggcctcccaaagtgctgggattataggcgtgagccatcgtgcccagccgatggcatgtttattttgtctgaattgtattcttaaaatttgtaatcttcaaattatgcttcggtattggtcagtttctactaaatgtatctagtacttgataaacgccattcaatcaccaagttcagtctttagtttatgatktatttcttctgcctttgaaatttaatttttcttccattatttggttttcttatttacaatgtgctaattgagctgttggatctgcattgtttgtatcttttctcaagtctacttgtttttgtttctttatgcttacttgcatactggatgatttttgtcctgttcgtttttaccccttgcagattgtttgctgtagtgtcttcattcctcattattgcttttcatgacatttaaaatattgcaatgatattttttctctgaaatatctttttttaaaagctctgttgatactttttatattctggtttcttttcatccctgtttcacaaattaggttttttaaaattttcttatatgtaagttgtcacctagttttctaaggtaaatcttttagactgtgacatcatgttcttgagtacttttttagttacttttttatttcagaatttttgtatgggttctataaatttttttctgcttttttacttaaagggtggcagttttctctgttgtttgcccaaaaataactagctactccttgcctgttctgtcattatactaggataccattacctctttcccccttggaatttaacaggctgaattatattaaattattttagttatcatatttcattatttttgagagaaatgatagggattttgtcctattaacctgttacaggtaagaaactttgtctttcttgatttttctcttgatgcttgttgaaattactgattattttagttatcatatttcattatttttgagagaaatgatagggattttgtcctattaacctgttacaggtaagaaactttgtctttcttgatttgtctcttgatgcttgttgaaattactgcacattttcatctttacaagtttggcagattttctttcccaacagaagaacttgactattgggcattctgctaatttccatggctgctataacaaattatcacgaacttggtggcttaaaacaatacagatttattctcacagttctggaggccacaagttcaatatcattttcacggggacaaaatcacggtgtcaccaagaatgtgctcactcccgaggctttaaggaggaatctgtttcttgctttttttcaccttccagtggctgtcagcctcatcacttgcctggtagccacatcactcsaatctttaagaccagcgtcttcaaatctgtgtctgctctgtcttcacatcaccttctctgtgtgtgtcagatcttcccctgactctctattctaaggacatgtgrgttcacttagaggtctctggataatccaggatcctctctccatctcaagattcttaatcacatctgcaaagacctttttttccaaataaggtaacatttataggattaggactggtatctttgggagtcattattcagcctactaggtatcattttgttttgctactttagagtgaggcagacatattagtcaaaaattggattagagtaaagcctcatagattgtgctgtttgttagaatcacagatactgtcctctttaccgaatgatgcaaactctgatgccatggtggaaaagtatatgaattgaattggatgtggtcaataaggattgctagggactcgagaatgcatgttgttctagggagaggaaatacgtgaaggtcaaattcaggttatcaggttatcagtttgtaacctagtttgtagctgcttttttcttttcatttcttacaagctggtcttgctgtagtaaaataattttgtgtgtctcttataatcttgatattgagaataagaggttttttttttaatgggaattccatccacatgattttaaagtattactttactaatgatatttacctaggtattcctagaactttagtcttctcatgtaacattttatacatttctcagaacaaggtaattgacaaataatcaaggttgcttatttattgatgaggaaagttagacattaagccaaaggacttgtccagtatcgcatattggatagacctataatttttaactttaatcttgtggtgacaggtatttccatttttttttttttttgatgtttcatatgtgctttgatgttgatgtgtcatgtgacatgaagtgtctccctattgttggataattgggcaagtctaagttctttttactttatattcctgattttgtttttctagatgtgttatttttacagattcaggttacttctttttttaaatcatgttattagagttaaactaatgaaaaatcatatagagatgaacttggttttgaaatataatgagtagatacttgcttggctggaattttttctcacaagttttttataaagatggtatgagtgtatactttgtatccaggaatgtgtgtacactagggggagtgttggggggatgagggtggaagacattttaagacacacaggaggctggtgtggtggctcatgcctgtaatttcagcactttgagaggccaaggcaggggaatcacttgaggtcaggagtttgagaccagcgtagccaacatgatgaatccccatctctactaaaaataacaaaaaattaactgggcgtggtggcacatgcctgtaatcccaggtacttgggaggctgaggcacagaatcacttgaagccgggagccaagatcatgccgccacatcccagcctgggcgacagagtgagactctgtctcaaaaaaaaaaaaaaaaaaaaaaaaagacacagaagaccctaagtgtacactcagatgctctttatatccatatccattatcagtttggtgatacgttattctagtttcatgaacctttactcttagaacttggtttattctctaatatcttttggattcagttttgcagttgagatggctaatatcaatttgatactctttccttttatgattgctcatgtttttgtctagaaccttgcattatagtatttttttttcttttccttgcatttctatagttgtgaacaactaggagtgggtttttagcaattaattcagtgagcttgttaattttgaaaaggcttcaactgaggaacactttcttctcatttctttgatgatagcttctctgtttctccttcagaaagtcttgttttttatatgcawatttactttttgggtgcactctccttgttaatgagttatttgcatctgattttgagtttattcagcaaatatttattaatgatttactgtatactctgtgcttggggagttgacctagggaactcaaaggaggctcctttgaagaattgatgcttgagctgagatctcaggaatgagtaggaattatctaagacatgagagaacagctgttaaggtagggaaagtagcatttgtttatatatttggaggaaggaagtatgatgagtactaggtactgtaagaaaacccttgtggttggagtagagaatgtaggagaagggacagtatgaagtgagatgcggctagagaaggtacgtaggggcttgacttcccagggccttcatgtgagccatattaagcagttatttatccacctcctacccccagcagtggaaagccattgagaaacttttagtacagaagtgatatggtgaaatttgtattttgaaagakttacttaggctgcagtttggagaatgaattagagggatgccaggatccacgtgaagagactaaagacgctagtattctgcagtgagaatgatggtaacttgagaccagggcattggtagaaaaaagtggacagatttgagaatgcttaggaagcatataacccatgggatttgatgatggactgatgggagatgaggtagagagaggtatcaaagatatccttagtttctgtttctttttctgagttggggtcttgctatattgcctaggctggtcttgaactcctggattcaagcaatcttaccgccccagcctccaagcagttgggactacaagtatgcaacaccgcacccagtgaatgttcttggtttgtattcaccttggtgggtgatggtgccattcactggtaaaagctgcagatatgtgagggtgctcagggaggcagcatagaatgggaaaagggcctacatgtaacccttgaggaatgccaatgtttaatggcttgggagatgaaaatgagcctgcaraggagacgacggaaaagcttaggggtaggaagaaagctgggagtgtgtgtgtagcatcttgaaaggccaatgggaagagtgtttctggagggagtgttatagttgaatgcttctgtgagcagtcaattagaggagggctaaaaatgtcccttagattaagtgacttggaggaacttgatttagtaaaatggccagacagccttttggagcatcaacattttttttaagaagtttaactgtaaagagaagagaggcacatgggtagctcgaggggaataagtcacatgaaaagttatttttaatgggtaacatgggtgacacttgtggctttaaaagtcacactccaactgagaaatgttgataaaaaggagaaaaaggaaaatagtgtaacattcctgaaaaaactgtcatttaagactcctttgaaacatgggcaccaaagctagtctagtagaggatttattatcagtgagaggacagagtcctattacagcagaaaagtaggaggagagggttatgaaagaattcattgaaatggttcactcatggccgggcgcggtggctcacgcttgtaatcccagcactttgggaggccgaggcgggcggatcacgaggtcaggagatcgagaccatctggctaacacggtgaaaccccgtctctactaaaaatacaaaaaaattagccgggcgtgatggcgggcgcctgtagtcccagctactcgggaggctgaggcaggagaatggcgtgaacccgggaggcggagcttgcagtgagccgagattgcgccactgcactccagcctgggccacagagcgagactccgtctcaaaaaaaaaaaaaaaaaaaggaaaaaattcattgaaatggttcactcatttattgatcttttttttctgtagtatccaatctgccattcattgtctctattgcaattttcagttcagtaaattgcttctcatttccatgaaactattttcagagtacctcttttttaattgacagtctgcaattgttttattcattcaatgtcatttcatatcttggttagtttctaattttgagctaatgaatactgagtctccctctttttaacttctgaattaaaaaaaaagtcatcttatttttctctgttcatttttacactttatttagcctaagtatctgaaattggctttgctagaaattacaattagttcactgttgttttctttcagtcccagacaaaaaagaaaaattttagatttctttcttttctcttcttcctttttttttttttttaaggtcatttatctttggcagttttggagatttagaaaagaaaatatatagacttgtaggcagaagaagatatggcactgagggaagttttagttttgttctgtgacagtcttccttatcttgtatgttgtctttaaaaagcctacacatttagattttcattacctcatttgcaaggatacaggatagcacatgtaggagaattggagtgtaagtccagaaacctaagtcttattcttagccttactgatgaaccagctttgtaaccttgggcaagttattctgtttctctgcaccttctcatttgtaaaataggtttacacaaatcatttctgcattttggctctgattcattatgcaagttatcaaaatcaaatttgtaactataaatgagtaatattttattatttttatttttttagagacagagtcttactctattgcccaggctggagtgcagtggcaccattataggtcactgcagcttcaaattcgtgggcccaagcagtcctccttcctcagcctcctgagtagctaggactacaggcatgcaccactatgccccgctaatcatttttacagagtcacgctattttgcccaggctggtcttgaactgccctcaagtggtcctcccacctcagtctcccaaagcactgggattacaggcatgtgccaccatgtgtggctctaatcatttttaaagcaacaatcagtgggaaatttcagctccaaatgggagaaaaatttccaaagaktagccttttttttttttttttttttacagatttgctacagttttgttaatgtgcttatttctcattaccatagataactttgagatggctgccttggattacaaactagaatttattactatttcacatagcttgggaaattaagtgtagtttgtgtagcctaaattatcctttatagagatgtagctgcaagggttagcatttcttctttgaaccccaggtatgcagtatattgcttaatactctattgttccataaatatgcattccagaagtcagctgaccatttgtccttatctttgaggacaaagcccrtacatatgtaagcattagtgagcaatgtagaatataaagatttggtagcagtagagagtttacgctctacatcccactgcaagtaatttgaatattgccatattatccactgtgacctgtgctgtttgttaacgttccttttccccaccttccccgaggagcttgtagtctctcactatatatttttttctctttggatttcccttcagcctttagatttcttatctctaatgcaagtctactctagatttttctcccaaatgtttaaaaccaaacctattatctcagtggtcatcaaaggtcctctagttaccagtatccacccttcttggaatgcctgtttagcartgttcttttgttatatgagtaagaataactctggtatttgctaagagaatataattttctccacattgtatgtatctatgtcctttgtttataaagcctggggggcgttccctattaggttaagtgtccctasgtaaatagaaaaatatgtagggttttattactcaactttttaaggtttctgctcaaattgtcagttgaataactcttgttactttggggctaacatgttgcatagggattttaacaataaaatatatagagcattttaaaaattattcactataattctgagtggattaaaccaaatgaccgggttcaagactytactatgagttcacctttgcttaataaaaggcaagactgaacattaattaatgacttcttggcccagccttagaatttttcagtttagggattagtttggtttttaaaaggtacaaaatgttcatgaaattttctgattatatcaaatattaattcagtcttgttttttgtcatagtactttgttttgaaaagttcagatcaactgataatactagtgctgtgatgagactcagcttgtactcaagaacagatttatgactaggtgagaactaaaatttctctcagaaactaactaaaaactttcatggacaaattgaatccccttgggatttactatttatggatatacgccaatttaattattggactaaataaaatactctttattagtccacttatggaagatgactgtgtaaacatagtatttgcaagtaagtactttttggtattatatttatataatcagctcttgtatccatgtagcttatagttggctgcttcaccaggactctacaaattgctcagaacccaaggaggtaagatttttatattgcctgttttcagtatgtaaaagtccagccacaaaactattacccttgactatatttttacagttgctgtggagctgaacctaaaattttgttagatggttacttggtttgttacatttttatatactaatttatatactataataatatactgtatatattttttaaagtctggggtttgtttttagaaagtatattctatcttcaaagaattatttggtagtttcatgtgtgtatctggaaaataactactgtacttctttataaaagtgagagtgaggtccctgctagttgaggctggaatctagacgtggctgtttatgtaggagttagtaattaaacagtgcctgtttgctgactgcctcatttttgccaggctctgtatgggtgccttgcaaggcattgcctcatttaaaccttgcagcagcattcagaggaaagtattaatatgcccactgtacagatgaggaagttgaggaatgctttattagtaggtgtgaagtgtcttaagcataatacctccctcctcarccttgctccctcatcctagttaagggaattgagacacagagataaggcaatttgctattgaccttcagcagatgacttaacctcaccgtggcttagtttcttcatgagtaaaacagggtacctatcttttaggattggtgtgaagattaaagaagttaatacatatacaaaactttagaacagtgcttggctagtagtaatctctccataaatgttagatgttattattaagcctgtgactacctgttatctcatgtagttgttcagagataaaaatgtaggctataggaaagaataaggaggaaagccaggctcctaatctgtctaagatagaagtgaatcttagttaagttttaagataatcctatgtgcttttaaaagatttcatggtttgcggtttgcttttctttggctcccagtttctttttttttttttttgacttcttagtacaggtaacttttgaaggaattcagcttaccttagatgaaccaaaggaaagctaaaagccgagataatttagaaaaactaaagcagagattatgttcctaaattccctctttctgcttcaaagtccaggaaacaccacctgcagatacagttgtatcccattgttagaccctttcctgaagccatcctcttttctttgtcttcccagagagaaactagtcattcgacaaagattgaacttcttctgtgtgttaggctgtgctccaagtgctgggaagacaccagtgaataaaacaaaaagtccctgctctcatggagtttacagccactattctaaagtttgtctgtattctgcctgtccttgtttttatacttttagcaaatatgtgtatagaattgttttgcagccttgttcagcatattgtcttcttttgttttttaggaatatctgtttatgtaattagatctgtttttgataaattgtattctgttatttatccttcctaccttctaatgagcagttaggttatttccaacattgactattatggttctccaaaaagatcattgaatatgtcaccttggatggatggatgggagagtttcttcaagacagcatgtttcagactttttgttgtgaccacagtaagaattatgtgcacctcagcttagtaaatacaaatatacacttgggacaaaaacttcaagaaacagtatttacttacttttatcacctgggatgcactctattttgttctgttttgttttcttgagacgttgtttcgctcttgctgcccgggctagagtgcaatggcatgatcttggctcactgcaacctccacctcccaggttcaaacaattctcctgcctcagcctcctgagtagttgggattacaggcgccagccaccacacccggctaattttttgtattaatagagacagggtttcaccatgttggccagtctggtctcgaactcctgacctcaattaatccacccacctcagcctcccaaagtgctgagattacaggcgtgagccactgcgctcggcctattttatctttttcaaatgcagtttacacacaacccagctgattgggttgtgtgtaacccatactgattaaactgatttatcacccgtgttcattatttttaaaacgttgttttgagatctataattagaagtggaattgctgagtagttgcttaagtgtatcttcaacttcttcaactagctgttgccagttgcaattcagagtggttgaaccaatttaaactcctatcggcactctaggggagttcctgtttctccacattctgaccaactcttgatattgccagatggatgagaaatggcatttgttttaaatgtgccttcccctatttactaatgaagtgtttaaagtgtcttttaaaatatatcacatagaagtttaatttaatggtaatcagagctggcggcaaggaggaaatattattgtgattgactgcctcctctggcagaaaaaatggtgtaaaaattatataataatatctatattatattgagtatttataatttgctagacactatactttgtgcactgtatacattattttatttaatcgtcataagaatcttgtaaggttagtgccttcttatatacttttttttttgagacggagtctcgctctgtcgcccaggctggagtgcagtgatgtgatctcagcttggctcagtgcaacctctgcctccaggttcaagccattcttctgcctcagcctcccaagtagccgggattacgggcatgcgccaccatgcctggctaatttttgtatttttagtagagacggggtttcaccatattggccaggctggtctagaactcctgacctcatgatccacccacctcggcctcctaaagtgctgggattacaggcgtgagccaccacacctggctgccttcttatatgcttatacaggaacagatggagaaagagattcggaaaggttcagtagtcacactattactaagtagtagagccagaatttaaacccacattggtctaatttcataacttattttctttagtacttcatgctattggtgaattcgtagaggaaggaagtttgtcattactattcttttctgttggtttgtctcttaaatgtgtttaattttttgagtttcactcacgtctctttttttctttccttttctcaaggtagtggagtctttcctctgtaaaacttcaccttgttgtttctagtctaggatagtggtcttgtaacctaggatagtggtcttggttactgcaattttggttgattatttcttgttggcccttaatgtgcccccatcttctgccttaggcattccatctaatcttttccagcagtttgcaaccttactgtgcctcagaatcacatatgaaaatttaaaaatcatagatacctaggttccaaccctaccctggaaattctgatttggaaatatttatttttcaaaaagtccacagataattctgttgcacagccatggtagagacccattttcttaggggttaatgatgctttagagtcacgcagacttgaatcagagccctgattcctttaaacttattagttgagtgatcttggccaagttctttaatcttggctaaggttcttcatctataaattggagataatattattatctaccttagagagttgttgaagagattaaatgaagtaatgcttgtaaaacacttaccagagggacttagaatacttcttaaacattgcctgctaataaggtgtcattattacgttatcctttatccaatcaaaatactcacctttgcagtgtgtatcaacttgatgtcagaaaaataatctgataaatatcaccataagggatggatgatagctagttttcattacttacctttcgttagttgaactgtactaggaggcagaggagtaggcagatggttttatcacgccaatcagccagtcttttctgcctatgtatcagtttggacctataaggaaaatgaaggggaaaacaaatgtttttctttccttcctaggaggattttcttcttgccctttttctcccagtttcctctctgagctgagtatcattagcatcatcaataccctagtttcagagctgcgtagtgatttacctagatacttttctccaccattattccctactacctaactcctcttcacctccattaaatctctgttcatcatgctatccttcttttggattgcctttagttcagttgtgacttacttgattacttgaacccaggtgtctacatttctaagctattgttcaagtaagggccaaggtaaattctaaccagctgtctctttgccttgtgtgggcccattctagaccagcgggtgttaacttttgagtattggaaaaggattagattagctgagccttcaggcttgtcagcagggctgtcactagaccctttgatcttctttatatacctaatggtcatagagtataataataatggtacatgttattactatatgattaatagattactagtagtaattttgttatatatgtatacagtacacttcgttatgtatatatataattgcttgcaacttgaaatttgaggctacaacatttacagtaatttaataacttaactgactttatcaaaaactgaaaaacctcatggaaaaggtagaatgtaaggtagacttaaaaggataggtatacttttttctataaataggatgaggcaagagtttccagttaaggaaactgacatgagcaaaggcttgaaggagcatgcaaatttggagcattgtgagtagattattttttagtttttcagagttcatgcagtgggaataaaactagggagtttggaatcaagcttgaaaattcctgaatgttcaaccaagatatatttgagttagtagattttttgggtatgtcatgaattcgtttggcttttcttaattgatatacatacaacttagtcctgagcttacacatgttcattgtatcattaaacatttagmctggttsgtttaagttgatggccactgccaggtctcctttctgccttctcccctttatcccaatgctttagtttttttctgcctttttgtctgttgtgatctgtgcttcatcaggctttcccccagttcctccttgttaatctccagattccaagtcagcaacacaatgaatgtctgcttatcgcragttgtgaattcccgcatatctctttcacttattaaaaagattgtttggtacatattttgtttataagacagttattgactttcctgtttctcttcctttgcagacctagaggatcaagacataatgggagcatttttagacaagccaaagatggaaaagcataatgcccaggggcagggtaatgggttgcgatatgggctaagcagcatgcaaggctggcgtgttgaaatggaggatgcacatacggctgtgatcggtttgccaagtggacttgaatcgtggtcattctttgctgtgtatgatgggcatgctggttctcaggttgccaaatactgctgtgagcatttgttagatcacatcaccaataaccaggattttaaagggtctgcaggagcaccttctgtggaaaatgtaaagaatggaatcagaacaggttttctggagattgatgaacacatgagagttatgtcagagaagaaacatggtgcagatagaagtgggtcaacagctgtaggtgtcttaatttctccccaacatacttatttcattaactgtggagactcaagaggtttactttgtaggaacaggaaagttcatttcttcacacaagatcacaaaccaagtaatccgctggagaaagaacgaattcagaatgcaggtggctctgtaatgattcagcgtgtgaatggctctctggctgtatcgagggcccttggggattttgattacaaatgtgtccatggaaaaggtcctactgagcagcttgtctcaccagagcctgaagtccatgatattgaaagatctgaagaagatgatcagttcattatccttgcatgtgatggtatctgggatgttatgggaaatgaagagctctgtgattttgtaagatccagacttgaagtcactgatgaccttgagaaagtttgcaatgaagtagtcgacacctgtttgtataaggtagctagactttttttaaaaacataaaatgattttatgccatattaatcactactctagtatttaatcatcttagaatctgtaattctgaaamcagtttttggcacaaytgtaggatactgttcaccaattatgaaaatatatcataggaccactatgtagaaataaattacccaattaccatctctgcaagagttataagctgaatgtttagtcttactacttgagctttgtaataatgtggaagattatcaaaggtaaaaagattttatcagagtgcatgttttgaaagaaagagggtggggagggttaggcctcagtgtctataaatgaaaagcattttagagttttaatatttgaccatgtgatatctcagtacatttatgatatcctaatcctttgaaactaaggtttaatggtctgtagcacttgaaagaggaatgtagtgatcattagacgtgatgtaatagaaatagccttgtacatggagtcagaagaacttgctctgagactgtgtatggttttaggtaagctatttaaactctaatcagtttttttcatcataaaaaggataagacattattatcttgtctcatggcgttgtcaggaggatcaaatgggataatatacacaggtgagctagctcagcccctttattttacagatgaggaagctgaagccagagaaggttctacaaacttaagagtcagacagacctgagaccaaggcttacctctattagttttgtactctacattcctgaacgaattgttcaacctctctcagctttaaaatggagataatagtatcttataagactgttgccgggcgcggtggctcacgcctgtaatcccagcactttgggaggccgaggtgggcggatcacgaggtcaggagatcgagaccatcctggctaacacagtgaaaccccgtctctactaaaaaacacaaaaaattagccgggtgtggtggcgggcgcctgtagtcccagctacgcgggaggctgaggcaggagaatggcgtgaacccgggaggcggagcttgcagtgagccgagatcgcgccactgcactccagcctgggcgacagagcgagactccgtctcaaaaaaaaaaaaaaagactgttgaggaattaatgagcgtatgtatatatatatatatgtgtgtgtgtatatatatatatacatatatatatatataatgcctagtttagcatataatacatgctacaccctttcctacagatattataaatgacgtgtacagggttttatacattgctaacagcattaagactagaaaatcaaggcccttgacttgggttcagtgttctttctgccacactctgttctgttttgtcaataatgcttattaacttattctttgatgtttttttaaacaaatgttgactttttaaaattcttctgagggtatatatttgatactcaaatatttaattatagcatttgaatacttagatgtctttaaaaatgaatgtagttcctaaaagttgtcagtttttaaaattaatacaagttaaaagctggtttataaaccttaggtagttttacctcttatttcatatttctacttatgaagcgaatgtattagccccacaatttataatttattttaaakgtaattttatcaggtacatataactacaggtcaaatcctattgtaaacaatgccactaaaattttctgtcatgttgtatggaaggagtgtgtgtacacatgtatatttgtattaggtatcacttcaaattaagtcaccagtaaatgtttagaaatagtattgttttatagaattataaaaaattattattacagtgagattaacctgtaatgtttctctcctgtcttttggagtattggttatactgtattctctctatactgttcgggggagggggagtcattgcacacacacacgcacgcatgcgtgcgtgcacatatgtatttttttctccctgaaagtaacattttcactagaacaagtataactgtaattggcacagctgtaaaggttctcaaggctttgaagagcaaaaagaaaactaaaatattctcaaatttttttcttcccagggaagtcgagacaacatgagtgtgattttgatctgttttccaaatgcacccaaagtatcgccagaagcagtgaagaaggaggcagagttggacaagtacctggaatgcagagtagaaggtggatcatttaacaaaaaataagtagctttattaaagaaaaatcttcaacacaatcaaactttaacattttagcttttagatttttatgtgtctttgacagctagtgtctagtgtatgaaagtggaaaaggacatttctgtagtagctgttaagatgtatgcagttgtcctatcacagttatattagaaataacaactagtgtggaaagtaacccacattctgttcaggatacttttgttttaaaaggctaaaatgtttgtgtgctttaaaattcttaatgaattcactggcatgagtaattttatgccgggaaaatctgatttgtggtctatttaattacaaagagattgtgatggtgataatttgaataccatctttctatgaaaagctgtgtatattaattttaatctctagggccttttttcaataacttgaaaatcacagcctcatsattagcaactttatatacacagctttaaaaaatttgctttaaactgtttcagagcttcttccctaagccataaactgtctcacctaaacaagatagacctcaataaaagacataatatttctccacctggcagaaaagtaactgccaagtaagattaagaaataagttgagcatttctggagtatatttctcataattctgcagagacttccagtttattgcatatatgcagtaaagtgtatatattatgcagtttctctaagtggaaaaacttgacatgactttaatagtgttaaaacatgaaaatgctggtgagctgaggtagaaaaaaaacaagaaaaaaattttaaaaatagcgttaaaatgcattttaggctcctaatgtcgttaatttgcacgttaaagacctctaatcgcatgcaagcattgacctaccacacctacatcccactgtgcctgcattattgaaattactactcactttaattttttttcccctttttactgtttgataccaatcataatcagtctgatactagaatcatgattggttttgttctttagtactgtctagagctactattttgtttttattgctgtccgccacttgatagtcatacatctagtatgtgtttgtactatttagtattgcattcattggacgtactattcaacgaatttgtctccttactgttaccaagggtcttggaatttttatattttaaattaatcattcaatataagttatttataggtatagtacaattttaaaatatttagaatgctacaatcattggttcaaactattgattcatgggaaaatttaaattcataagaataatatgtatagggataagttgatatttaatgtattggcactttaacttgggcagacatgttttcttattggtttaaagaagtaataagtattttaatatttttactatgaaatgggatccaattttagaaatgaattgctacttttctctttagtgtgtacactttaagttttagatggaattatgaaatattcactttacgttattttgttacaataataagttttatatttcttattatcaagcaagagttgccacctggacagagtttacattgatactcaatatttttgatatgttaaagtgttattatacttgtaccattcaattggagattgtcataaattaaatatggtattttttactcagatttgatgagactgcaactagagaataaatattacattaaaattgctgctattttaaaacatagaatgtaactgtttgtattgtaaaagttgtgtgtcctcagtgaaaaatactgccttcagcttccaaagcaggcacctgaatgcctttttcttttctctctctcttctttctttaaatacatgccttcactagattgctgtgacctactaaacctcattttatttgcttggaacatttttggcttctctgtccacaccatagaaaaggacaaaggccttccagctctccttttctcttatttgttcccttctaaatacttgactctctgggggtgtgaaaagattcagctcataatttatactactattaattttgtggtccttctaagccaatttaaaattatacttttgtgtatatattttcaaaatctttgctactgactaccttagctttaaagttgctaatttggagatgactgatagaatccctgaaacttggtggaggggagtggaaaggagcagaatgtgtttgtgtatatgtatgtgaaacatggatcttctatatataaatattctttagaaaaagcgttcagtctttttacaattctaagtaaaacgtataggtcaacagaaattaaaggaatatttcttaaaattcatttatttttcttttttgaaagcagacagaagcaaggctagtatagtatgaatggtcaggtagtttaaatgcgttgtcccacgtggaacaggagatattaactgtttttaaagctttacattatttttttacaagaatttgttttcctgtaattttcttcacagttaaaatatcctaatttatattttaacaaaagagatgtaagatacatcaaatatagatgattcaaggtaatgttttttagacctgaaactattgattcaatttatcatcagtgtttatttctattgtatctagttatctatccaaataattgtattggcttagcggagactgtatgttaagtgtattagttttagattgtgaaattgtgcagtttaggtaaacatcaaatccctttatttttgtacagcagatttccagcattagaaccatgtagaacaaatatactagatgttaaagattacacaataaaggaacttggcaaaccaaatctgagatccttgctttttgttcagatttaagactgtttttttttttaaggcaaaaaataatagatggtaaaaatttggcctttattctaaaaggacagtttgaaccatttaaagaaatattatgggtagccatgtctttaaaaattttgaggcctgatcaaaggacgaatctttatacacattgttattttcaaaggtatttacaaattgagaagcagaatgatgatttcttgccccactaatgacaaataaaataccatttcttaccataaacattgaaaaacaaactgaacaaaacttgaccatataacttacaaatacttttgacttgaatttgcatgtggagtatgtgtgctaaaactgcaagtgaagactttttatacttagaggaatagttgtagagttctttgtaaggttctttgttcataattttttatattttgtgatgtgaataatagtatgcatctgcatgacaacactgcagatcatattgctgtgcccttttaataactggatattttaaaattattttaaatgcagttgtatggtttatcaaatggttctctttttaaacattttataaggaaatttagaccttttctattcaaggctttgttgaagtaatcagtgaaggaaatggtattatatatctatacagtatattgtttaaaggtactttagagaagaattaaactgagacagtgatgttcaagtacataatctgtgcatgctatttaagtatcattttgcaaatataaatatatacataaaaataattgagttagtatataatctataaattcccctataattaagggttgttattttcaaatcttgaaattgtttattttttaaaattccacgcagtgtattatatagggcaaagttcaggaaacatgtttccagtctaaagagaggagtgatgtaagaagaaactagttgacatcttaagaaagggtattctcacttgtgcacacatatccttgattatataatatgctgatttaacatgaaatattttttcacattttaattttgatttgaagttaatcttatatgtcattttgtgcattttttgtcataaatcttcaaaggtcaacctgattttttttttttttaaatgataccagattagaaaaatctcagatgtggtaaatgccatctttaaaaagctaggttatctttgtttcggttttcttttcaattaaatttggataacacttacaaaaaaagtacttctgattcccagaaatcataaagaagcagggggaaggcgtccccgacttagtccatgtgatgcgcacattagcgagtgagaacatccccagcctcccaccagggggtgaattggcaagcaagtaagttacattctgtacactcttatgctttatgtcagtgtatgaaaatgttaggtattcattgataaaatgtttgtttgcctaatttctgaactgatgcagttatctgtgttttaacctgtgatttcaatttttttttagtattagaatatctagagtttgtttagacataggtatcagtatcattgtaactaattgcagtgagggttgtctttattggaagcttggttggcattgatttcctcatagagcataaacgagataatatactgaaagaactttttaaactaaattacatagcactacataaaaatttacaaaattctaagtgtcgttgttagtagtagtataatttgatttggtcaatcmctgagtaacttaacaccctgaaaattccccttcctcatatggaccatgtttctatgcctgattttcccagtatttttggttgttgattgctggttagttggttttaggtgtcagggaagaagatagaatatatttcttgtcttttccctttccactttagttcatagaattggactactttgtgttaaatattaagcttacacctttacataataaagtggaaaattcaagcaattccaagggttaaaacatttttacctcaaatatccatataattgacttacaaacataaaacttgcaaatacctttagcttgaatttggatatagagtaaatgtgctaaaactacaagtgaagacttcttgtacttacagtgaagatatattattgactaattttctcgattctctactgtgttttgcaagtgtgaccatgttctttgtaatcactaaatagtgattgtaaaagctcctgttwgaagcttttattwtttggaaactttttttttccatatgactttctatgaaacgatctataaaattgcttcaagtcaattttggaagtagggagactataacttataaatatactacagatttttaataaagtgttactcaaaactaattcctagacttgtcatggaaatgtcttatttgacatttcagttttaatagaacttttgaaaagggcattaagaaaagtagaagcttaaatataaagtataatctgagacttcaaaactacgatgcaactcaactagcttatgttagtattatatcttaagaatggcattgccattgatgactcataaccatttaaaccaattcaaatggaagtagactatatagactttttttttaatctgtaatttttagccttctattaactgggttggtagagtgttataacacattttagagtagactcacctctgctttaacataggagcccaaatatcttaaaagtgaggctcactattgacagcaagaaatagaactaaaataatatctgagtataagattatcttagaaattttaataaacacctggctatgagttactaagcaatgttttgctttctgaagaattaattttctgcatttttttacacttaggaggaatgttattgaagccgtttacaatagactgaatccttacaaaaatgacgacactgtaagtagcattttagctccctctgctttcccttcccctccactctaaatgcatatccttcctacctgtttttgcagagctgttcactgtacccattctcttacacacacccctgattgattgctctgaactctgcttgctctgatctctgcctgcaccacagttctagtgattgaggacataatcatggtgagtggccacctctctcaaaaaagaagaaagtccttttgaattattctagattttttaagtctttacaaacaatcaacttcagaaggtttgcctccactacatggttttttttttttttttttcccgaagttgggactatctctactcagaatattgtcttattctgagttttgtaagcagctgcagcagaacttcggaatgtctgtctcaactaaatagttcttatggttggaaatacctttgtcaggaatcctgaagtatatacttcacttaaatattagagaattgtttgcataaatagacattagaatgccatactctccagttaagtgttctgttgcaattctgttgtatgatgtttatagaaaagtgataacttaaagatcatgtgggcacagctctgaaatattttatgtattgcattatgaagcttcctcacatattgagttcttaatcttttctgatgcattaaaggtttataaaagtggtattctaaaactgtattggatttcattaaaaaattctttttagtagatttattgattgagtaatacatttggacagcctcatcataaaaccgcatttcaaatattttccaaaacaaaacaaaggattaacaattctttgaacagattaaacattgctatttcatatgtacacatatatacttatatactttaaaaaacatttatattctaaaagtcatctttacagaacattatctttctccattatccagaaagtatggtgtattttggcaccgctaaattttaacgttgttccttattttgcttccttttacaaaggactctacatcaacagatgatatgtggtaaaactgctcatctagccatggagtttaccttcacctccaaaggagagtacagctcaactttgttgaaacttttaacatccatcctcaactttaaggaaggggatatgacatgggtgagaatgattacatcagagaacttcagcagtacaacagctagcccagaactgatttttttttttttttttgtaaatttgagacttatgtaagcgtgatttcaaaccataattcgtgttgtaaatcagactccagcaatttttgttgtatgattttgtttttttgtaaagtgtaattgtccttgtacaaaatgctcatatttaattatgaactgctttaaatcactatcaaagttacaagaaatgtttggcttattgtgtgatgcaacagatatrtagccctttcaagtcatgttgtgtttggacttggggttggaacagggagagcagcagccatgtcagctacacgctcaaatgtgcagatgattatggaaaataacctcaaaatcttacaaagctgaacatccaaggagtyattgaaaactatcttaaatgttcttggtaggggagttggcattgttgataaagccagtcccttcatttaactgtctttcaggatgttccttcgttgtttccatgagtattgcaggtaataatacagtgtattcataagaatctcaatcttggggctaaatgccttgtttctttgcacctcttttcaagtccttacatttaattactaattgataagcagcagcttcctacatatagtaggaaactgccacatttttgctatcatgattggctgggcctgctgctgttcctagtaagatattytgaattccattttatcaataaagcttgatttaacaaacaagaaacttaatcatgtatgtgtaattcctcttttaccctggccttttaaaacactgtgccgttgtaatgagacgtttctcatagggaaagatgttagtctcttttaattggacaacactgtcactcaaggcatagatgaaactttccttccattagaaagactaaaagatttaattcttggttgtaccttaatctattttttaaataggtttctttcaggctgcttatttttcattaagatgtgtatcagcttggatttgcctactgtttaattaaaatatttattgtcaaagtttgacaatctaacactctatggtaggggtgtgtgtgtgtgtgtttgtgagtgtgtgtttgcctgtgatttttaattggcccatgtctttagaatccaagtggttaagatgtatttgtgatttgaaatatagcatgttgataatatttagctgttggcctttacaaataactttcaaagcttaaggaattgtagatataaaaataacctaatttaatttaggcttaaattcctctgattaagcatgtgaaagtaagttttaaaatctgtcgcattgaaaagattactgttccgtgcccttctgtatttttgtctctttaggttgaatattgtatttatcaccatgtaatcattcagtaggcagattcccactagaaaactgttgaaatgtaagactaaaatacaacattgaatacaaaatcaaaattttgtgtataaaaaccagtatagtccattttgttatatttgttttttccctaacttggaaatatacatatttgtatatatagccttaaaattaatgtaaagttaggggagtagtggggaaagtaatgtgaaatgtctcagatttaagtagttaaataccagcaaaatcttttcattatccctcttattttgtgaggtgattaaatgtaacttaattgtatttaatttatatcttattccagcatgaatgaggaaaaactgaagtactatttatatttagaaattcatatcagttgaaattacagaaccaattccatacttacaataaatacttaatgtctaaatctgtggtagagtgcgaagtatgataatgttctaagttatggctttgcaagcatctaaatrtgcatttaatgaataccagtgcttctagtatagactaattaccagacatactggtactgaaagctaaatccctattataacaaaccagttccttaatattttaagtagactgacaactttagttccagaaattgcaaaactttgaactggactgtgtaatcttttgagatgcaaaacttaagtcacaagtagagtatgtgatggaaagctgtatttcaaaccataacagcatatttagagccttttttttttgagtctttaaacaagagaaaattaaaatattcctgtcaaaattattagtattgaaattaggcttggacacgagagagaaccgtatttgagtgatgtgagaagactaaatcttttccacatgagtcagcactgccatactaataatttttttactataaaaatacaggaaggaagtatacattataacagcagactgtgtgtgttcctgattcctggaggtaatagtggggggaaaccaaccatactttttaaaggcacttttgcacctctattgtgcacttcattcttgtaccacttaaattcttcacccccatcccctttttttgtgctaattagcatctcagggcaatgcctcaaaaatgtttgatgtgttctgttctttggagggaaaaagttcttatgtgatgataatatagtactcaaaatatacttttatcatttaaatgtcttatttgctgctatgaataggaaataacattttgtatagcaggctctgttttaccctaacattaaaaaatttcactgatctttctttcattaacagggtagaatctcctaatttccactttcttgggaatatacttttatagacaatagaagcagttctcaatattagcatatactttaaaaaatcaaagtgataacttaattcagctttggaagtatctcaaacatatttttactttatagtgcattaacttgcttctagagtacttaatgcaactgctctagccacttaattttttatactaatctcaacattaagaaatttggattaagtaataaattagttatgtaattcaagtaatctgaattacagcagtacttttagtgatcattcataggactatatattaacccagctaataactcagtttttttacaaaatgtttcgagtattattggtaaaacactgttctaggctaagcacattgggactgtaaagaaatgagtagatccttggcttcaagtttacatctggacaatttataatctagtgtatgttagtattataactggatcactcatcaaaaaatatatatatatatctattgcccacctgctatctaccaggtacttagctgatcaaggcaggcccctgccctaaagaccttgtttatacttcctttactcacctgaaaactgttctccagtttattttcttctctctaaagttaaagagtaattcagaagaaaattttgcttagcataagaataaaattggactgaagaggcttaagcccattcagtatccttgattgcatttatccaacggcctttattcttcctgctgacagcagtaactcagaggaataggtagtagatttctgaaaattatccagccatggaaatgtaggtggggtttgagtttaaggcatttaaaaatgtaaatatctctagctaaatttatcttaagtagaactctgtgtttttgtaacacactgccagtgttaatatcaaattttagccaaattattactatgtgttttaatattttaaaataatttcactgcccatctttactggacaaactcatttggagttcaacttgtgatttctgaaagaactgatgaaattgggtactgctttttttctccatttttcgttttgttttaattttgaatttcatggtatatacttttagttcaaactcagctgtttgtacagtattgtattaggatttggtattagaaaagatgtgtaaatatcttagtatataattgtttctcatttgaggtttttcttctaagggaccttaaagagttttatatacttttgctcacagaaactgctggtgagattaccattttttgagtatctagtcttctagtttttcttttaggcattaggaagccttctttagagttcaaaattttagaagcctaatttgctcttacttccttcaattatgtgccatgtgttttggtttgtatatgttttaaattgtatatttccttggaatatgcttgaaatatttaagaatacattttcaaaatgtataatactgtattgttttgttgatcagaataataagtctcagttaaatgtttgttattactgatagtcaaaatgctcaatagaaatgatgagaggcattggttccaattcattgtcaaatgaacgttttctaattttgttcacagattctttccctttcgattgttctgtatgttaagatagtggcttctgctctcactgttttcctatttatattactagcaggtaggagtgctaattagaaaaacttagatggtattgaaattacagttgacaacttatatttttatgagatggagaaaaaagattaagttgatataacaacaaagtggactttttttcttccttatcctgcacgaaatattgcccttgtttcctctactttcctcttggtgttttctctttttttcaaacagaaacaggccaattccattttcttgagcaagaaagcttagtgtgttacttcatcaaggccagctaatactgtgttaaaccgggctgaaaatgagaaaacttgggagatggaggaatggggaaatggcagtgggataggtagggaaggattactcttaattgttttaaaagccataggaaagtcttccttgtacgtggctgtaaatttataagaactattgtgtcacataaaccaacaagaatcaacctttgctgcttcagataatttgatttttccagcaaggaaattaataagttactgattcttcagcatagaaacaactgagaagaattaatgcaatgtttcttcactagaaaacccaacccttcatttcttttcattgctccaaaacccagttttcaactaatggttttctcattaaactaaatgtttagaaaagttgtttagagtttttctttttcttttacatagtcctcctgatccagtataagactatttagtaacgtgcatttgtatggtactatctaaagtaagttagattgatgtaagagatcgggtagctgcggaacaaaattagttatatcctaattaggtacagtgaatgacacaaaatcattttagcaatgcttcttaaccttttggggtcacaggcgttttgagactgatgaatcctagggacttatttacccaggaaaatgcgtatataacatacatatctccctaaagtttacaatattgtagtggttcatgggccccctggttaagagcccattctaaagtacaatagggcatcatcccttttcctgcaaagcccaaaagtatatttctagggcatgaaaataacttgagtctattttaaggaattgtttcactctagaggtagataggggacctggctagaatctgacattaaaatatactttttaaaaaatattatatttggggtggggaaagtgattaaaaggtgaaaaaaaaacatagtattcagaagttttggaggttaatgtctttctctaagatttgccactttagaaattcaacagaaaagaggtaaaacagaaatggaatgtatctggaacatttttggcctccatagtgcagatatactatattaacaagtaatacatttatttacctgtcagatctccaggttttaagattttgagctttctagtattaggattcattaaatgttcaattcatttcatattctaaggaattaggttatttacttactaattcaggatgttaaaataacatccaagtcggacaaccaccaccaatgcacacagttaatgagatttctaaaatataataagtacaatgtaacaaacgtatagaattttgcatttgttgccaaaattagatgtttaatgacagcttatttaattcccatttgtgggacttctggaacatagaaaccattatcttacctggttatcccttgactaaatagcatatctgcaggaaaatatcttgtttgtagtgatatgccccaatagtgattgatttcactcttgaaatgagttatatcacttaatttgtataaatgttatgagtggagagacatgtacatgttaaaagcatgttgcattatatattcattttttaaactctataaatgttaagaataatataattgcagaaatatttttcttaaatacaatgtgtaacaaaattctccgtagcaactcacccactttgcagtttatgtgatccacacttttaaagaaattccataaatgtatattttgtattatgtattatttcctggtccaaagaaaatatgtgaattcagttctaactttaagaatgtactgtttgttttcaagttcattgaaaaattgcattcagcctgcgaatggttgcagattgtatgttagatgaaaagtagaaataatttctagtttggaaaactggtgccactaaataaacaggcaattacataatgtgtgtgtatttatgattgtttaatattgcaagcagcatttttattccaagaaacgtggagaatttgaaattagctgttggaagaccttaaaagaattgtttttttcagctgagaaataaatctgataggatttgaactagatttgttccttcctaattttaggaagtttactgaaagccaagaagtttgagttgatggttattgtcatgaaacattccagaaataaagaagccagagtagtttctctttggtaagaacattcccatttgtctgtcttctagtagatgattactcccttgaagagttgaaattgggaattgggagtggtctgggaaaggacttcctcacctggtatctgtggtatagtgcctgcttcaaaatggcacttaaatgtgtgtgtttctaggatgcagaaaggaggtgtttatttcctctgccaattctgatcattggctatattatatcctgtgttcattcatgtctgaaagtgacttaaacaggtttaattgattctagtcatggcttccataattagagaatttttagagttgaactgttaataaaagtgaaattctgtgagccgcaagagctcattttgtttattgtaaaatgtgtaataaaacagta

SEQ ID NO: 95003 - DNA, 41630 bp, Homo sapiens
  misc_feature (1)...(41630): n = A,T,C or G
cacagacctcattaggttgtatggccctgagagtgggtatccttgagggagtacaagctgtttcaacttagcccttttctgcgctaattagaatttcaagcgtcacagagcctgggggctttcaagatagcactaaactaggtttacttaactccttggcaggaaatagtggcccccatgcatcacttctgtgaatccactgccagggagaagtggagaaacagatcatatatgtcacaggtctagagtggttggaattgacaaatataattagctagttggttaattagggtcatgtccatactttcatgatgaaagggaagcagttgtcggttttcagcaaaaacgattcagccttcctgaagcctatttgatagctgttttggggttttgtacakgtgtttgctttttatttcttgagacccaggcttagtcaatactttcttaacttggcacccataatcaacatacagatttttcttagcaacagttgtctgctctttagggtggaagcgatagagaatcctgcttcgtgcatcagcaaatcctccttccttgctatgggaagggcttatgttctaaagggtgattcagtgtcaggcttatgagactgagagtaaagttgatgaggaagagaaggctcagaagtatctgaacaactactctatatgtttatatttttctgcttgaggggatagagatccctcctccatctgcatctgcatatagaactgcttaagaggacagcaagacaagttgctgcagggggatggagggtagacagaatgcctttttttaaaactgaaaattttattgagatacttaatccacctgcacttgtaagaaatcatacagagaaattctattttcctttacacagtttccctgaatgctaacatctagcaaaactgtagtacactgccacaaccaggataactgacattgatataatctactgatcttgttcagatttccttccccagttttgcttatgttcatttctctctgtgtgtgcacgtgtgtgtgttatctatttctatacagctttatcatgtgtaggtttgtgtatctgccactgcagtcaacatacagaacaggccgggcgcagtggctcacgcctgtaatcccagcactttgggaggccaaggcaggtggatcacctgaggtcaggggtttgagagcagcctggccaatatagtgaaacaccgtctctactaaaaataccaaaactagccgggcgtggtggtgcatgcctgtagtcccactactcaggaggctgaggcagcagaataacttgatcccgggaggcggaggttgcagtaagctaagatcctgccacagcattccaggctgagtgacagagcgagactctgtctcaaaaaataaataataatttaaaaaaagatacagaacagttccatcaccacaaggatccctcgcattgctcttttatagcaattttatagcaattttctcctcccacaacccccttccccatctctagctcctggtaacacagatatattctctatttctaaaattttgtcatttgatatatctttttgtaaacatataattatacacacatatttctctaccacttatactttttcaaagtgctttcacatccttatagcaattctgcaaggtagccagggaaggctttcctatttcaggtcagaaaacagatttagaaatattaaatgacttaatgaaggtcacatgtttagcagtagaactagaactgggacccaagtctgatgttcagtcctagaccttttctacttgcccggtctgcctcttcacaagggaagacttgggttttagaatccagagaccttagaaggagcaaattggagaaggtgaggacatgatggcctttactaccggaagcaaaaagtgaatgtccagaggtgaagggacagagaagtaacaggacccatcagcatttcaggcaatttgcttcctttaccaggagggtctctgtcctcttacaacctgggaaaaaataagttgtgtcccaggttgtaagtttgctttacttaggcccaaaggaactaaagaatggatatcagaaatctcaccccaattgttttgtcttacaggcacagaataggttctagcctcagcattttcattaatgtagtgtttttattaacatctccattaacttgcttgcagcaatgagatggaattatgcctcccacaaggcctggggcaagatacttgcataggtgcccccttttgtttggacagtagaaacactgcctcccctgccatggtgttcaatccagttggcaggtgggccagcttcaaagtgcagaaggaactgggtgtggtggctcacccctgtaatcccagcactttgggaggcaggcggatcgcttgaactcaggagtttgagaccactctgggcaacacagtgaaaccctgtctctccaaaaatacaaaaaattagctgggcatggtggctgttgtctgtaatcccaacactttgggaggctgaggccagtggatctcttgagctaaggaggttaagaccagcctggtcaacatggcgaactccgtctctacaaaaaaatacgaaaattagctgggcgtagtagttcctgcctgtagtcctagctacttggaaggctgaggtggggaggatcgcttgagtccgggaggcagaggttgcagtgagcgaagatgatgccattgcactccagtctgggtgacagagcaagatcctgtctcacaaaaaaaaaaaaaaaaaaaaaatgcagaaggtccagggcctggccaaggggatgatgccctgtagcactttgctttgcaggaagggaacaactgtgctgtgaataccaggatccaggagggagggagggtatatctgtgtcccccagctagggacaaggcttccttaaccttaggtcctcatgcttatattagttcttctccaacaaagtttgactttgagaagaagctggcacatggctgaaatgcactcacgcggttgggggaagagtgttcttccagtcctcctccccacagggcctcctgcttctcctaagtacctgtcatcaaaggagatgaagatgaatcccccttcagcccccacacctcaatgagttgtcaagtactctccctcccacttgaataggaagcaggagcagcaggccaggttgcaggttgaggaagtcagaagttaacttgagctgagtttgcagctctggagagattgaggagcagacttttctcttgtcactttggaaggagaggattgtgaggctgcccctttaaatagcattcccgtaggaggcagatcacatccatccgtcacctactgccaaagcatcatttttggtttctatcaaactcaaagcttgttggaaaggattgtggggttaggggagtgaggaggcagagcctcctaggggtagggggcagtttagaagctgaaaaggagaggaatgagaaggagcctgggaaaggtgggggatgaggacaagaggaaaagacagggagagaatagttgtcttttgagcctcagagtggaacaagtatacccaattcttatctgtttagagacgcagcaaggtagaaatgggattgtattgcaacaagaggaatgaggttgagactaaacaccaggactggtgactaaagaaagtgaaaggagccacagagtgaaaaaggctgatagacttggctctggttttatcacttactctctgtgagaccctataatttttctgggttagtttagttctcatttatttttatttttactttttccatcaaactgtgttgtctatgaagttttcccatttattaaatgaagggaattagagtggatgaactctaatgtctctttcacgaataactttgtgtgtgtgtgcgtgtgtgtgtgtgtgtgtgtgtgtgtgtgtgtgtgaattagccttaaaatgaatcaggagcagggggtcttgggagagcaggatgtgacactgtgttaacaagaaatgttgagagagccctctggatgtatgtcttgcctctttcccacctattctagtttaaagacctgcctaaatttggaaactccttagctctaatcctaatttactaattagagctctttagcaccatcctaatttgcaattcttttgtagtttccagcccatttcattttcagttgataaggaggagattgctcccaaattttcagaaatggactgtgtaggagtgtgactagggtctcagatgcagccatttcttggctgggtctggggaaaagccaagggatgtgtgctaaaggtagatggacagagggtgggaagtcccttattatttccacttttttctccatctctgactctgccatctctttctgcctctgtactttctgggagctggttctgctgatacttctgctgaatctaaatgctgacctaacttggcaattcttttatgttaggagtcttagctgtgacagttcatccgcttcttcgcccttccatttcacttcttttctccttctctgactgggagaggaggagcctccactcagtatttagaacagagtaaataccttctcctgatcactcctccttccaacctccagaattttttgaaattaaaattcacattctgggatcctggattagtggcctgttttggattcagtagttagtgaatatatctccactttctgttgacataggagtttccccaatgmcaaagcaggtggtcattaagggagagaacaatatggagcaagagaggtggttcctgcaagagtcctaggtaggactcggttggatggaggaggctttgmccttttacaaggtcttgagttcaaattccagttcactccttccacaaatgtttattaaccagctaggctgttttgtgctgggcctttagctcctagatttctttctctgaagacagaacagaaaaaatgagctggaagtgcttcaggaggggttttgatatcaggaatgctttcctggctgtgtagagttattacctagtcaaagaagaagatgttaagctgggtgcggtggctcacacctgtaatcccaccactttgggaggccgacgtgggcggatcacgaggtcaggagttggagaccagcctggccaatatagtgaaaccccatctctactaaaaaatacaaaaattagccggcgtggtggcccgcgcctgtagtcccagctactccaggaggctgaggcaggagaatcgctggaactggggaggcagaggttgcagtgagccgagatcgcgccactgcactgcagcctgggcgacacagactccttctcaaaaaaaaaaaaaaaaaaaaaaaaaaaaaaaaagatgcctgctctggagagctttgaacttggaagaaattcctatctgctaggcgggcaggcagaagtaccatggagaaggccacagtcttggagacaggtggggaagatcaagctgagggacccgaggccaagtgtgggatgccatcacagctcagggcacaccctgaacttttccaagacaggagcacaggtggggtctggtccgactgggttccgagtccagatctagcagggaaagatgtgtgctcatcccctaccccgcactcagacatgggacacgcaggcagctaggcacacgtggatacatggaaccacaaccacatacacagaaactcaaaacacacggagagaacccacacaaccacccacaccgaagtccagcccgccgcctccgctgcactctgtaaacacgcactcacatccgccagtacagggcacacgcagccactcgtccccggcgcctgtgtgcgtgcgctcgcccttgggcgcttctgtctgtgtgtcccccggcttccaatcgttcctttgggagggggaggagtggctgtgaggagtgagagactggcgggcaggctgaggagaagggagggagagcagagggaggggggaacccggccgggggaggaggagagaggcgaggaggcggctctggcagcgcgcggcggcggcggcggtagcggcagcagcagcggcggtgcggagagcttggactgggagcccaaagctcggctgggcagcgggagaggaggagccgcaggagctgcagctctgccagcttgggccgagcctagagacaccggcctggctggtccacgccagccgcaggtgggaagggcctgggatggggggtgagggtctctcggctggggctgaagctgagccgaggtgctgtctcctccttctgttccgtagaccgtggctgagcatggagctgtccccccgcagtcctccggagatgctggaggagtcggattgcccgtcacccctggagctgaagtcagcccccagcaagaagatgtggattaagcttcggtctctgtaagwccccggcccgggaatggggggaagggaccttagggagcctgagcgggaggaggaggggggataactggagcagggctgtgggctggtagattctctttggcacagatgttggcaggtgcgaggaagcacggccctgacacgcgtggccaggccacatgtgcaaggcatgtgcggagcaagctggccagttggagcgggcttaggagttgcaaaggtaacgatgtgcctgtgcctgtggaccccaggctgacacacgcagcgcctagaggcagcacagtatatgcagtgtggcagggctgcaggagggcagtagaggtgccaggctgactcacacatatccatgtgcagagttgtgcagatgtgagccacatgacatgtgtstgcatgagtgagcgtgggtcacagaggtatgtggagtgattgcacacagctgtagatctactgcatgggaatacttgtgccaacctgtgggtcatatgtatctcagttgggattggtagtttctgcctcatgcacagggagtggggtgggggttaccccatgcctgagctgctcatctcttggggcctggaaactcactctatgtattaatgatgaggggacccacgtggaatctggaggggggggttggagcccccacctggaagctgaaggaggtgatgatggtgaagaaatattgattgacaaaggcaaggtaactggcttaatcagaggctttttgtttatatagggtcttccaggatctccaagcacatttgggcatcttttcctattgttgcagtaccagggcatgtggggaggaataaatgggggaaggaagaactcaggtatctgatactccagtcccaggggaggaaaggaacttttcccctgctccttagaaaaaaaagaggattgggtcaaagacaagccatgcaccatgtttatctcccagtcagctgctgccattgggaaatctccgcagtctgttgattcttaatcagggaacaagagaagatgtccctctctccgagatgaatccatggccccaggaaagaggaaacagataggagactatggatgtttagagaggaaacacagtaaacatagccctgaacccagttcctcctcaatgttctccatagtgagcaccgaagctttctatttctgggttctgggagagggagagatgggggtaggggatggatagatgcttatgttgtattgttctttaaatacttcacctatggtgataagatgacacctttttatggcagatgggtctgatttatacactagctacttggagagkcgttagggagaactgaggcatagtgggcaacaaggcttggaatccaaatgtacttctcagtcctcctccttggctgcctctggccaatccaatttgctgggctctatgaagcacagccttggaatgagttctgggatgaagaaatggaaaaccagattgaactgatttttgttgggaggagcactgtgtgattcttgatagaaaatgacgctgcgttaatggtaaatgagctggggaaaggggcagataaggaagtagttgaaaggtaaagaagggccccaggtccataaatgggagaattcaggatggctcccctaacactagtggctcatcatacttaccttgcctgtattccaggtaacagggccctgcgaaagmgtgggtattactagtttcactatctcccacacatttctaaccaaaagcctttcctgaaaatgaattgttgtttcttcctttagtgtgagaagtgctcagtggtgagagaagaggattcccagaaggaggcatgaaacctgggaagagaagggagtagaggcatctgtctctccagagtgccttagctgagatgtccttacatgagattagggtggacaaggatccctattcttattgattagatcattctggtcttcactcacttcagcagtctggtccttaagaatgctagctttgtacaataaatttacaagtaaaaaataaagctagctacatgtaatataacttacccaaaaaagtacaatctccggattattaattggcaggaatagattcccagtctyacgtccttaaagcagagaaagaccttgaaatcaaggtagatcccaacttgatctatgttgatggcctactggattttgcctttttgaatattggggaggctttgactatcagatgaagggaaataaaaggatttagggctttgctgggtaagaggtgggagtttcccaaccctctcaatgggatggtttctgaataggtgagaaaggagatgttcccccttttaagtggaaataaagatccccctgcccctttggtcaaggtgggaaggggttgctaagtctggaaataggaaatagacatgattatcttaggactgggtactgcttggaaatggaaacatggcatatatacttgtatgtatttatctaactatctatctagattcttctactcaacacatcctattcccccccttctacccttttaatttctaatcaggacatccagactttcttcagggagactaggcctggtgtttttgactctggataaaaagcccacactaatataatagtgcagggcaattttttgttgggaagagcatccaagaattctgtttcccacactaagaccctgtcaaaaataaattcagaatctaatctgtatcatatgagctgaagagaatctcttaactgtgtgattttacccctattttcagaacaatttctctaattaagcaaactcataaactgaggcatgagagagggtgaaagaggccatctggagatgatgagttggccaggatgattttcagcatctgtaaccctaagaggaagtatttgacttggctgtccacccttctctgagatcagagggctttagggaatgggaagaagaccagaagagatagaaatgattttctgtgtcttttgtgattcaagaaaaacgatgagcagacattggtttgccatcctcagctcatttatttatccaacaactatttcttgagtgccttctatggaccaggtggcatgctggatgctgagaatacagtcggtggtggacaaaacagacatagtccctgttcctacagagcttgtaacctgcttcaactccatcaagtggtgtagagaggcagggggctctgtattccctgttttgctacacccaccaagtgatgaaattctaccactctgggtttctgcctcattttttctttaggggggttatatacataggaaaagcataaatatgagttctctttttcccaggatggtacaaacaccactctcttttctctgctccagtttctcttggaattttacattttacagatggaacttcccccttcctttgggacagtatagacatagtccctttctctttttctttccccacatggtacgcactcgggaccctcaaagtctaggctcaatgttctatgctgtggttcaaggtcattatagatgagctggagcagggaccccactggggattatttttgcttatctttgtttcatcagagtctagtgtgataccttgaacataacaggcactcaataaatgctgttaaataaaggaatgaacaaatgaaatagtgaatatatgtacatatgttacgaggtccagttctgtctctggttctgtggtgcgtgtatacctccgtgtttgttgagtggcggggggaggagtaggaaatggaggtggaggaaagggagatgatgatgatgctgtttttttgagagggtgatgcttaaaagatatggggtttagggacctcaggacagagcctggaactgaaggagttacagagaggatccagaaactgtggcgtttggattgtgtgaatgagatatgttaggatgaaattgtgaatgcctgcctgacacgtatacatgtgtttgggtaaaggttgatatgtatgctggggacagagctccatgaagatgtgtctgtttttataagtggcatgtgtaataataaatatattgggaaggtgtgcacttacctgaatacctgaaattgtcctagttatgagatgatgtatgtgtgtatgtaggtaatgggataatacctatgtgtgatcttgtgtatgtatttgtgacactgagattttttgacattcctggggagatccagtggatgggaggaagaagctgagactgggtgcctcattggtttaaccctggcttttgccctctttttgtataggccccatggagtgatcttcyatggttcttaccagttttgaaaatcatgctgccattctcctttttctgtctatggatgtggagctgctgtgaagattgcagcataaactatggttccctggacctctggagaaaaaggagtgtcatttttctcatgccttggtggggacagttttttagtgctatcctcagcagattagtccttcttcctctgcttccagccatagcaaagggaatctcttctccctcggtttcataccccacttttccatcaaatgtctcctgtctctatttcctccatcagctttgtcttgaatgaggactgtgtggtatctctgggaaggtagagggtagaaaattcctgccttaagttgaagggaaggtgcagaggtaggggatcaaattcagccccaaggaagaacttcacaaacctctggtcaggataggtggctggagggagggaagcagggaggcagagtggtggtagtggaagggcatggggaattttgggagacttgagttcgagttcacattctgccctaacaattacaacggtgtaatctttaagtcacatagtctctctgagtctcagttcttcatttaatatcatcatgtaaaagtaactttgaaatgataaagcctgaaggtctttttcatcatgggagagcttgctttgtgaagaggcaggggaatgggaatggatgggcaactattggctgggatgagggagacaaagattcaagaggtaggaatatgaattacctaataggtttgagccgtgattgaaggagtcttgttgatggttatctggaaggagtgaaggcatgtgtctgaacttagagaccagaaggataggtgggactagaggagggcaatattatgaaggatgtgggccactgaggtcaaaagaaaggagaggaacttcctccttatcattttttcccaatggtcaaactggaagtggatggagcaattgcagttctgagacatggtgagtgtgggaagcccaggggctgccataggtgggttctatgaacattggggaattcccttckgacatttatcccaagtccctaggcctgagggtatcatcagttataccacatcctattttagaaaatcactgaagtctcttagaatccaaatatcactctgcttgtccaggagcctcaggaggtggtttgaaaaaagacagaggattccacatttgaggttgcatttgccacctttgcccagaggaaggcgaaagaggttggggatgcatgggrctagaaggccaggtgagatgctcagtaggaaagaagcctgcacatctatataactacaccctgccagggagttcctgaaatcaaaggaatggtagcttccctatctcccagattcccccaacctttaaatctttctgccaccttcagactgggatggaggagcagaaaaccttgaaaacaggtcttccctctctttttgagtctttaaaggaatccttgagaatttgtgtccaactcctctgctctctctcattttctcttctttgattcttccatcttctcctttgcctcatctttctctgggttctctttcgctatgaggctcccttttgctcttctcccttgtcccacttcctctctctgtcccattccttttgacttaccctttcgctcttgccatcagtacttctcctccctcatcttggctaggagtcagaaaatccccgtggctccctcccctcactgaggggttgctgtggtgatggtacaggataagcttgctataggtgccctctggggccttaggagtccagccccgactcctgtcttctgcaaggcgtgtcttttgccttctcagtgacctcatcctcctagtccctctggggaggaagccaagtaattgcctttgaatctcaaggggctgatttttctcaggtacggaagttgagtagctattttccaactctcttcaggatagcagcagagaaagagggacaaaaccaggacagcaggtggggtggaagtgagacaactggggagactggaagttgttagataatgaaattgtcccctaaggcagcaagactacatggtctgagagaactgtgggaccattcctccgttcctttgggaaggggcatagatgggaattgagcagggaaaaaagagtgactgagaagggaaaaggataaaatcaacttattatccatacaatgcagggaggtccttagtgcccctgcycttgcccctgtgccctagtatcccccagtcctgcaactgctccttttccctcagctggggttgcatctatggagcttatcgctgtctgagaagaaaacaccargtccagattccacttcagcactcagacctggcaaaggtgcactgagggagatgtgttggggttttggtagagaggaaggcttggtgggaaaagggtcaggttgtttttggggtaaggcctgggggcatagggcatggagaagagctagaaagggggtgcttcaggtggtgctgttggaaagagccagacttccaggtcagttgattccacagctgcagtgagaagtcagatttgcaaataattatggtggctacagtggggtgattaggctgccagctggtgttggcaccatttaggttgggaagggaacttggctggtggggggttgagggctgggggctgggggctgggggctggttgtagggagaggctgagtgattctctggcaggcaggacctggggaaagtttttccttttattcctatttgttggcttccctgctcccctgtttatcaactcctgcatatctgcttggcaccatgtccctagttctcttctctgtgcccaccttgtttggaaacttcttgtggcctggactgagtgaacacacaggccaamggaattgccaaacttcctaaaccatgagcatctctcttccaagcaattgctttagaaattccaatctggaagatgtataataaatcaaattgcactagacacctcaaagacttcttggtccctcctattctctccccttctgctcttctttgaaatgccaagaaaatttgctgttgttttttaaattgcagtgaaataaattgaagacagatatgcaggagaacttcctggaaagttcctggaggttagactgtggcctttctctgataaagaaaaaatctacccttctcctctaagcactgggttagagctgatttggggaagcagtgagccagtcagaaaggatgaactctggaactgggaaattgaggcccaagcatcctacttccccagtgtctccaacccagtccctgaatctgagaaccataaaggctacagaggaggaacagatccccagagatagttagtaaaatcggggcagtgctgggaccagacccaaatcctgctgatccataatctgatgctgccctcatcacacttgcagtcagactcttgctaagcttttaatttactttcccatcccagactaccttcaacatytgttaggccccatggaagcagggcatctkctgggaacagctgttaggatgtagtttggagggctggtggggtggtccatgtggaggtggttaatgagcaaaatcaaatggtgtagggagggagragaggggtggagaaatgaaccagagaaagagttcttctggactgggtactgggagcctcctctttagtttgccttcctctgaccttctcacccacccctcccaattcctctctctctcaagggctgaagtctgatggaaaggtgactcatttgtgttcttggctgggagctgggacacctgggttcttattggtctgggctgaggctcaagctgcttagattattccctttctcgtgtgatctgagttgtgctgggctgttgctaggaacacctgttagaaacggcttctggtcagaaggcacaggcacaggaggagtctgaaagcagtctctcccacttcttcagtgtgttcccagcttctcgaatgcagcacctttcaaatctcctttcctttcctccctgcccccttaatacctcctaccccttttcctcatctcccttcaccctcctggtttctgtccttcccccactatcttccaatcttccctagggcctgccccattccctttcctcatcccacccccacccgtagctcctctgtccagtgctgagggctctctcaccactgctgccatgtcaacagtgcctcccaggatggcaacccagctttgccactggggggctatttttatctgtggagccacccccgccacaatgcccagccagctgccagaactggggctttctgtatagcaatggaagccagaagccaggggagtgggggagtgggaatgctcgggtgaggtggagagctggttgttcttggtttctggagctacatgctctacatactctgcagcctctgcctccactgcctccccagggcctctggaataagaagccagagagaagccctaaacgtccagagtggtggcgtcagggagactagagctttcccaccaatatccaggtgccatctgaggcctggatggaaagtcaggggtcctggctgtaagagtgggcatatgggactttgtttatgaatgactcaatgaatatttgctgaactaactaaagatttggactaaataattatccttcatattcatgtatcactttagggttcccaaggtgttctcataccatatctcattaggtccttgtgaaaattctgtgaagcatgtattacttacccattttacagaccaggaaactgaagctcagagtgactttcccaaggtcacacatagtaataaaatctaggcaaaagtttgtgatttctttttaaatttagttttttcttttcaactgagctagccagaaaagtctcctgattttataaacttacgccctctttctattggaattagatgatttccttggttctttcaatttctgagattttggagatttgaagtcagccagtgaatcccttcccgagcacccacccctttagccccagccgcccccacccctttacccccacccacccccaccccttttctcttaccagaggcagagtctcccatcctttgtttcctacctcaaccttattcttcactgcaggctgggcaggcattagagttgggttcctttctatttttaaactacatttaagggctaaaggaaaatccatactggaccctttgttgaggtcatcacatttatgtcctgcctgccagccaggtgacagtctccttagaggtagagtgtggggtgtgtgtatatgtgtgtgtaagtgtctatgtgtgaaatttttcctcaggaagggatgatggttgatcattatccctccttattaggaagagtaaataataataacaggctagggcaaagtatgcagcatgcatacctgggctgaagtggtgagcagccattcgtccaaccagctttggttctaatgggtaagagaggagaggaatggacaagatatcctcttcgaggcttttctagtctaagaaatctttacttttcattaggagagttgaggttagcacttacttggctagagtggcagggtctggagtgagggtacaagacgaggcagggaagttggcctgggttggaggttattagtgtttcaggctgtgtgctgccatctgcccccactctcagccccatcctgcaacgcaagcatgtccacagaacatgccaaatgacctgtcctcatctcctgggtggcattcagggtctctgacactgggtctagtcctttctctctaaaaacactcatcagcttgtggtcattgtggggagggtggtggtgggacacagaaagagatggatacagagagagtgggtttcttccctcccaagatctgcagcagccctgcttcacggctaccaggtgttcactagagaacagccttaagatatttgacttccactcctcttgttgagatcgaagcccacttccacttgtcccagtactcagtggaactgagaaacagcaggttcccaaacttcatttatttctgattcttcaaggctttggcataatgacaaggtattttcatttcttcctgcttttgacgggttggggtaaagggaaaacttcctgttataaaatcctagctcttggcctgtgtcttctcttttccctttctgctgacatactcaaccccattagttccttttcctctttaccacatcacccgcagccatagacctacatctaagagattgcagatccctgaactcttttccccaatgcgttgggcttcacccgccagctcttctccttagccccgccyaactcctcagctggccaatcacggccccagcgtacatgtattggtggcgwcatctcccagccaatcaggaggcgggctgggactgtgtgcgcacgtccacttggagctgcagaggctgggttcttccctccccaaccttggcgaaagcaaagtctgaaggcgggagaggggttcctggtcctcagaccccttctgggtgcctcttttggcccctcctgggccatctcatcgcttctccttacctctgagcygattgacctctctctggttaattcatggttattccccaatttccattttacaaatgagaaaactggggctgggggtgttaatttgcccaaycccttggtttctatgagcgagttctcttgactttcmttctctgcttgygggtggagggcccttccctccctgttgagcccggtctctggataaggatcccctgacacctagcttcaggaagcccctccctacagttttttatcctctgtgggaagttcatccccctgtcttgcttccattctgtgaggtgggttaaagctcgttttgaagaatggccccagaaaaagaccctgaaagggagctgaatctgcttagctccttttgggggttcttgcagggccccttcccctcccgctacagacctcctctctgtgacagattcaggatggttccctgtccctgcactcttaagcctcttgctaaccccctttttcccaaaagaggagccccacctcctcagagcaaggggctggcctgtgctatttctgtcctttctgggcttcttctgagaacagattcttgttttccgtctgattcagatgtgaaacttttcccgcagcctcccctctcacccagttcckgtaggctgggtctctgcctccccactctcttcttcctgcagccaggcccctccccaaagttctctctggtcagttgctcagttctactgggacctggaggaggaaggcaggggccaaagaggaagttgtcccctcttgggggccctggggctcccggggtcaggattttgatactctgaagcaggaaactttgattcccatggcaaaccctgttcctgttcagaggagccacctccagggccccattctcaggtaggtgccagggatgagaagaggaagggggaggagggagaggacaggttgctcatggatccaccagttgtagtttagtgaagtggagagatcaagacctggcagtcccccatatgttttgtgcgtgtgtgtgtgtgtgtgtgtkcgcgtgccaacttcaccttttactctgtccatcttgccctttaccttattctcctcccatttccatccccccccacctttktaaaaattgcttcttcttgactatggtaggtgacttatcattgtttcttccttttctctccttcctgactgccaacatccttaggacctcacattccttcgaaatttcatcttgtcttaagaacccaaactggaaatagaattcttctcttgactcccatcccctatcttattctaaagtccttcagagttagaatctccccagacgcactcaaaatcttcacatcactgttcttctgcaggaagtccttctctggcttccctgtcctaagccccctacttatggtgatctttttgggaatgtgggtgctggaagcggaggcaggggactttggaaatccccagaacaccagccatggtgagccaaagaaatgaactgtagaagctggagaagctgagctcttctgaggtgttggggttataactgccagagtcttttcctcccaatggctgcctagagctaggagagactgtggacttccagaagttgggatctgaggcttttccaatcgtgcagggactgaaggtaaagcagaaagaagtggtggtggtgaaacgggcagggatggagttcgaaggaaagttgggggaagctgccagttttccttggggccagatgtggactggacggggttgagcatcctgttctacagggaaaggtacctttactgtgccagattccttgatggctgaaacagagggtttggattaaaactgatgttggtgggatagaaggacttcctgcagaagaacagtgaggtgaggactttgagtggtctggggagatcctaactctaaaggactttagaataagagagggccctggcaggccagaaagtatggggtgtgtgtgtggagtgggttatttgacttcaggaggktgcagttcagcaccttcaagagggtgctttcagctgcttgagtccaggtcctcttcttagacttcccatttgtcaaatttattctttaatcttttttcccctccctccctgcctccttctggtgtctggattgtgtttggttcagatttcaacagaagctatacaagagctcctggacaagatctgtaagtgacagaaggagaaactcggagggaarcctgtgcttgaagtcaacctacaaccttactcttctcaggctcactgttatttttagaaaccctggctcagaaatctccattgtgagctctgggagatagcctcacacctgattaattttcccctttccgttttatttatttaatgaacttttactgagcatgttctgtgtgctctgaggatggaggccaagataaacaagccactgtcagcgtcatcaagacactcacagtckcctatgggccaaccgacagaattaattaaggttggaccggctgagactgcagaagctatggtggaatgggttccagcctctctctaagctaactgcatgattaggtttgttctgccttaacagcttcattgtttggggacacggttaggttccattagcttgagttgtaggccttgacaacctgactgagatggatgagttgtgtgaccttagacaagtcacttaacctccctgataaggagtttgtgaagattaaatgaagtttgtaattgtaaaggaaagatcatggctattatctttctcccatttcctctgttagggagcttcctaattaccagcctcaatccaaaccaactcagtcttctccatctggacttgggagagagaaggtacttgtatttgaagggagtgtggtgtgagctgggttaggaccaccatgatttgatgttgatcagtcaattcctattcaaattacatttttggagaccttttgtatgtgccaggccttttaatgtattatatcacttaatcctcttattaatagccctgtgaaatgtttattatcatccttaccactttatagatgaacaagttgaggctctaagataaacattctcaaagtttagtgtatattagaataatctggggtgttttttaaaaatgcagattgggttgcgaactgtggctcacacctgtaatgctaacactttgggaggcctcaagctgaggattgcttaagcccaggagcttgaggttacagtgagctatgatcatgccacttctagatcttgtccaggagctcttgtatagcttctgttgaaatctgttgaaccaaacatgatccagacaccagaaggaggtggggagggagggaaaggaagattaaagaataaatatgacaaatgagaagtctaagaagaggatctggactaaagtggctgaaaggatccaggtgctgaactgtaccctcctgaagtcaaataacaccccccacacccatactttctggcctggcaggaccttctcttattgtaaagtcttttggagttaagacctccccagacccactcaaagtcctcacctcactgttcttctgcaggaagtccagagctatgatctgggtgaccttgtctcttaaaaaaaaaaaaaaaagcaggccgggtgcagtggctcgtgtctgtaatcccagcactttgggaggatgaggtgggaggatcacttgaggccagaagtttgagaacaacctgggcaacatagcaggacctcatctctacaaaaaataaaaaaaaattagccgggcatggtagcacatgcctgtagtcctagctactcaggaggctgaggcaggaggactgattaagcccagcaggtggaggcagttgtgccaatgcactccagcctgggtgacaaagtgagatcctgtctcaaagtaaaaacaaaacaaacaaacaaaaaaaaacaaaaaagcagatccctgtccagcagatccctggacagaaatactgattcagcagctgtggaatgagacctagaatctatattttttacatggatccaaggtgattctgatgctggtgggctacagaccacattttaaaaagcaccgattaagagttagtgacttgctcaaaggctcacagcaggaagtactagctttgaatccaggattcctgcctcccagactggtgctgctgctggatacatctcaccaaagctgcctcctgagccttggtttctgcattgtaaatggaaatggcaattccttccccgcctcccttcttcataggcccattgtgaggataaaatgagataatgtaggagaaagcacttttaaaaatgtagaactggcagcattgttagcgattatgcaaatacatgcaaatgagtgccgtgggtgtggctgctcactttgggagccagtgctgggatgtgggtttcaaaaggtgggtcgagaagggaactggaagaactttgatgatgggcattgatccctggggaaagttttgtaaaaagggccgaatgaagcagaaggctggggtgggaatctgggggagagagagaactataggcagaagaagaggccttctttcctttttgggttttatgtcaccagatttgagggtccctggctatggggactgatcggcagagggaagccccagcttgtgcctgggcaccaaaggcaaagcgtacctctttgttctgtgatctctgggcggggtactctgggagacactggctcatagcccctttccagctcatttagctgggaaagccttttatgatatatctcgcctctattcctcctccctaatgaagctggagctggggctgagctttactaaaatcatcctcttacttgttaaacaacctgctgtttccacatggagatggtgcagcaggaaggctgaaagtgagatttgaggatagccaaccaaggaggctgcagtgccgtcctccaacttctttgccactttcccttctgtcccatttgctctcagacgtgtcatccaggattgctaggccctgaggtgagaactggcctgtgatgcttcctggggctggctattttgggcaccccattccaaagctgccgagaccccgggattctagagctacttctgttcaggaacgccattgttctccctcccccggcatccctgggaattgatgctaatttcagcctctgatccctgactcattctcttctcctccctgactcatagggtgaccttgggtttttgaagcccctctcagtggggaattatgatggccaccatttcagccccagattggttttaggtgggtggggcagggtgagggaaaggagagaaaggaatatttaactgctttcattaaaatcaccatctgaagagctttgtttgctttgtgactgcctgggctgaactcaccaggcttctaagaagtctcccagttaatcaacaaaccccagaattcrtaagtgtaaaacatgaggtgattgttccttcaggcaaaacatccagtgaatgagatccctgggcccaccccaccacttttatcctggaagaagcttcagtggggacagaggcaggggatgggtacagtaactctgtcagaggttctctctggtgtaagactggaaaggcaggggttaacccggctttgtcctggttgatggattctggaatcataatccattagctttgcctgcatggagagaggccaggcgaaagcattcagatttgtctttgttctgtgcttttgccatgcctgccaggcacagaggggctgtggacacgtaacccccaccccccacaccatgaccaagagacaatgaaatactcttgggggctatcttgattgctattgatcccaaagccctctcccatgggggaaataagcagtttcagctcttggttattcaggctatgaaacagatcatcctaaaaacatcactccaggggcttgtacctgcctaattctgctgggccctggcattttaaacaagactaagcactgactaaagagcgggtttcgagaagtcagatggtggtggggatggtggagtcaggaaaacctggcattaaactttgggtgtagataaacttaatacaggcagtggcaatagcctgagattaaaaaagaaacattagctgctattattattaatgttagaatgattaactatttacaaaagactgaggatgtttctgtaaaatgtaccttattagggagtatgctgttctcatgataaggtagctgtgcctaagcagcctctctgtatctgctccctgcaggctgcgcyacatggtgaagcagttggagaatggggagataaacattgaggagctgaagaaaaatctggagtacacagcwtctctgctggaagccgtctacatagatgagacacggtgagagagaccgacagacagagaaggagaaagatgtcagacatagtgttccagagagaggggttaagacaaagatagacacatgtggcatggacagagaccggaagaaagagagagggtggaccagatataaagagctctaggtagtggctcacacctgtaatcctagcactttggaggccaagatgggtggattctttgaacccaggagtttgagaccagcctgggcaacatggcaagaccctgtctctacaaaaaaaaaaaaattagccaggcatggtggcatgctcctgtagttctagctactcgggaggctgaggtggaaggatggcttgagcccaggaggcagaggttgcagtgagctgagattgcgctgctgcactccagcctggtgtgacagagcaagaccctgtctcaaaawaaataaataaataaataaaaaaaataaaaaaagagctccaggtatccagggagaaatagtggtaagagataaagaagcagaggcagacatagagatgcagagatagagacaaacacagatatcaagaaggacagaagactgcttcagagttggaagggaccttaaagctcatctattccactgtggaatacctctagatgtgtgctgcccaacatgggagccaccattctgggtggctattgagcacctcaaatgtggcaagtatgaactgagatgtgtacataaaatacatgatggatttcaaagacttagaaaaaagaatgtaagatattcatatatatatatatwtwtttttttgttttgagacagagtttactcttgttgcccaggctgaagggcaatggtgtgatcttggctcactgcaacctctgcctctggggttcaagcaattcttctgcctcagcctcctgagtagctggattacaggcatgtgccactacgcccagctaatttttgtatttttagtagagatggggtttctccatgttggtcaggctggtctcgaactcctgacctcaggtgatctgccygccttggcctcccaaagtcctggggattacaggcgtgagctaccgcgcccagccgatatctcattaatatattttataaggctgggcgtgatggttcatgcctgtaatcccagcactttgggaagttgaggcagcctgattgcttgagcccaggaattcgagaccagcctgggcaacatgatgaaaccctgtctctacaaaaaataagaattagctgggcatggtgatgtgcatctgtagtcccagctacttgggaggctgaggggggaggatcacctgaatctggggaggttgaggttgcagtgagctgtgatcacaccactgcactccagtctgggcgataaagtgagaccctgtctaaaaatacacacacacacacacacacacacacacacacacacacacacacacacacacacggtttcatgttgaaatgatattttggaggtattaggtaaaataaaatttattgccgggcacggtggctcacgcctataatcccagcactttgggaggctgaggcggatggatcaactgaggtcaggaattcaagaccagcctggcgtggtggtaggcacctgtaatcccagctactcaggaggctgaggcaggagaatcgctcgaacccgggaggcggaggttgcagtgarccaagatcgcgccattgcactccagcctgggcaacggagtgagactccatctcaaaaaaaaaattatcattaaagtcaatttcacctatttctcttttcctttttaacgtggcctactagacaatttaaaatttcatatatgcggcttgcattttatttctattggatggtgctgctctatagcatccctgaaagatgcgttccatttcctgcttaaacacttccatagttgggatgctcactacytcacatggagacctgtttcattattggagatgttagataaagaaataaaaagatatagagaaagaaaggaaacagggttgaagacagagagctggcatgagagttactaaatgtggggtatggctgggtacagggtctctaggctgtggaagcacctgctgtctttcctctgtgactccccttctggggtctcaggcaaatcttggacacggaggacgagctgcaggagctgcggtcagatgccgtgccttcggaggtgcgggactggctggcctccaccttcacccagcaggcccgggccaaaggccgccgagcagaggagaagcccaagttccgaagcattgtgcacgctgtgcaggctgggatcttcgtggaacggtgaggctcgcccacactcagcctccctctgcctttagctgtgcccctctttcccagccaccctggtcttccatgaccaccagccatatgatcccatggctcatccccacatccccagctggccacacctccactcccagaccttcatatgtgggcttcttctcattgttctctctcaggatgttccggagaacatacacctctgtgggccccacttactctactgcggttctcaactgtctcaaggtaatctctgggtttttgggaaagaggagaaagttaggggatggaatagccactgggacttctagaccctgtttatggcattatttttgccttccttttttttttttgaaatggagtctcgctcttgtcactcaggctggagtgcagtggcgtgatctcgtctcactgcaacctctgcctccctgcaagcgattctcctgcctcagcctcctgagtagctgggattacaggtgcccaccaccatgcccagctaatttttgtagttttagtagagatggggtttcaccatgttggccaggctggtctcgaactcttgacctcaagtgttctgcccacctcggtctcccaaagtattgggattacagrcgtgagccactgcgcccggcctgccttcccttttaactgttgttcccacatttatcaaaactgcttttgcccagtataggagcaaactcctgccttcctgtctctcccatactgagagatatatgggaagaaagaggcacacttyaccatttctttgctttcctatttaccaagactttgtactcatgggaagtccttcttgaagtctaacttcaacccttgctgctgctggaaagccacataatctattgtttctccatagaacctggatctctggtgctttgatgtcttttccttgaaccaggcagcagatgaccatgccctgaggaccattgtttttgagttgctgactcggcataacctcatcagccgcttcaaggttgggcagcatcctacctctacctccaggcaggattctccactcctctcatgcctgttctaaaagcctcccaacaaacagattccatagatcccctcactcagtctcaacatcagggaagtctccccatgcccacgcccagcctagcctttctttcacttgctgcagtcttagttccagacttcattaattgatttctagggggagattctcggtctgcaaccatctagcctgggattctgctctctcccgctttgcttttttcccccaacttgtcctctctaggctgacttgcagtgtggacactggaggcctggagttcagatgctgtcagccagtgccctttgggactagaaaccatgtttcctggataaaattggccactccctcccccgtcccccagttctggtctctgtgcaaggaattatatagagaaggtcagctcttgacagggctsggggcgggggcttgtatgacagggggacrgtgtgtgaacttcatttgctcttcagcttgtctggatgggaagaattatatgagattaagtccttcctagatcctgtaccaggagggagcatcttttgggagggaaaaagtgccaggaaaaaaacaaaacactttcacatggacaaatcacatttggaagtagagggtgagggaggttgaagagccgtaatggggatattgggtcagcactttggggagcagtagatgttaaaggtgaagggaaaygtggatgatctgaagggccatagagaggggcggtcaaaggagtccaggtggagggtcccctcccaggccggcttcgggaggtcattccatccatcctctgcctccacttcactagaacaaattatctgtgcatgtaagcccttccttcacccttgactcctccttttacaacaactccctagggagtttccaaaactttcctgagatgctcagctgaaattttcttaagtgccttccggaagcctgttctgcaattttactttcttctttccaatcctgccctctccaggacagagaatagtagggctctctttttcctaagamttttcccagctcatgtttccccaaactggctctcagacttcagtcactagattctcctaaactctgcctccttacctggaaggactgggtctgggggacctcaagagtagctgttttgggttaggtttggcccagtcccagtctgctttgctccaaggcagttagaggaaggagggggtgcttcttgttttagttttctctgatgatagggccagcagcagctgcccttctcaaactccacattcttttcctgggcacctagcccctcccctactcctccctttttcttcccttccctccagggacgccatggcaacgcaaaagcaagggcagttgtcatggaaacagtcctttaaaatttcctgaatttggggcacagccctccaggggtgcgggtgggggatgttagggtctgactgactagtggtgcttcttctgtgtctctgtcactatattgctcatctctacagaaacctcccgagtcctgaaccttcgtcccctcctagcctcaagagattcagggacagatcaccagtcctgtcctctgggagccttgagccttttgaaggaggcagacataccctaagggcgtacacagagacagggcccggattcagagtagctggacagagctctggctgctggtgcttttgtgtgtgttctgtgggactgagggcgcgggtactggtgcatgtagagggtaagtggtcagggagggcaacccacatctggctggaagagtcctctctaggtcatcttcttcattcccttacttccgagcccttcttcatggttttggatgtggggatggagtgggatgtttggaaggtaggagggaagctttctttcattttctttgaaatctccagggaaataataataattatagctattctttagagagcatttactaaatgccttgtacttatctcattaatttccaggtaggtggtattatctttcattctgcaattaagtatctgaggcacagagaggcatgtgacttacccaaggttgcacagccagcaggtggtagaggcaggatatgagccaggttcacctaactaggttctgtgctctctccctatgccacactgccttctaaagaaagttgttgatctcggtccgtaatcaccaccattcctgtggatccttgatatatctccatttcccctaactccccgcagattcccactgtgtttttgatgagtttcctggatgccttggagacaggctatgggaagtacaagaatccttaccacaaccagatccacgcagccgatgttacccagacagtccattgcttcttgctccgcacagggatggtggtaggtgccctggagatgattcttctgtgattcagggcctatggctacagaactgggaggtctagactgtactcccatttccatttctcctcgttggttcttcttgggcactccaaagccttgacagagccaaactggattaactcactctagagaattcccaggtagactaaaactcgttggacagtgctagggacatgtgctgggatgcagtgggagtgttgcaggttcrgatggaggaaggtccttggccatttcaggagctgagaaacctgsctgcattaaccaagagctggcctggaagcatggaagggatgggatgagtgatctagcctgtgtgtggaggttcctggraagtgaccagcaggcgtcacccctctctcattctttctctttcctcctgtagcactgcctgtcggagattgagctcctggccatcatctttgctgcagctatccatgattatgagcacacgggcactaccaacagcttccacatccagaccaagtgaggggtggggatgtggcaggggcaggaggggccaagaggaggtggggaggttgccggagtccctccttacagggggtggtcatgatgacctttggctttgtaggtcagaatgtgccatcgtgtacaatgatcgttcagtgctggagaatcaccacatcagctctgttttccgattgatgcaggatgatgagatgaacattttcatcaacctcaccaaggatgagtttgtgtgagcagaagccagtacttggcawccctaagagactcccttaccacaaactccattttccacttcctggacctcctgcccagcagcgctgaggggactgattgcttctctttttatgtccgctcagagaactccgagccctggtcattgagatggtgttggccacagacatgtcctgccatttccagcaagtgaagaccatgaagacagccttgcaacagctggagaggtggcatctggtggggtgtggctggggccaggccagagggagggktgtgtgaactgggggggtatacacaagggtagttggtgtgccaggtctttacctcgctgtagagactccactggcttcaggtatcagactgcatctctatgtgagagagagagagagagwgwgtgtgtgtgtgtgtgtgtgtgtgtgtgtgtgtgtgkccttacgtttactcacagccttggcagctgatccactggagagtgctttgggctgggartctaagatgggggttctcatcgtagctctgggacaggcttactctggaatgttggaaaattcattcaacccttctgccccagttttattacctctgaaatggtgaaaatgatacgcctccccccacaacagcttgcccctagttcctagtctcatagggctattgggagagtcatacgaggtttaaaaaaatgcatagaacaaatgccataattacatctaatgttgcttagaagtgagtgggaatgtataaatgtgtgtgagagtggactgtgtgtgtgtgtgtcctgaaggtgtgtgttaatctctgtgtaaggtgtttatgtgtgggatgcagtgtcacagcgggtcattgttgagggtataataataattattactattctagataatatctactgagcacttattatgtgctagacactctcctgaatacttatttgttgtttgtcacttaattctcagaaccactcgatatgtggtagggttgttatttccattttagagttgaagaaaatgaaatatggaaattttaagtaacttgctcagtgtcacgcggctaacatgtggtaggtatagacgtgaacccaggccctttgattctaagagcctgggctctcagctactaacccgtgctgctacctaaacatatataagtgtgtgtgtgtctgtgtgtggggtgtgtgtgtagctttggagggtgtttgaagttatgtgaggccgggcrtggtggctcatgcctataattccagcactttgggaggccgaggcaggtggatagcttgaggtcaggaatttgagaccagcctggccaacacggtgaaacactgtctctaccaaaaaaatacaaaaattagctgggtgtggtggcatgcacgcctgtagtcccagctattcgggaggctgaggtgggagaatcacttgaacccaggtgacagaggttgcagtgagctgagattgtgccactgcactccagcccgggcaacagagtgagaccctgtctcaaaaaaaaaaaaaaaaaaaggaagaagttatgtgatagggtgtgcgtgggaagttagggaatggtcctaacttccttttcctaaaagatcagtctcccttcccttgccatctgccccaaccaggattgacaagcccaaggccctgtctctactgctccatgctgctgacatcagccacccaaccaagcagtggttggtccacagccgttggaccaaggccctcatggaggaattcttccgtcaggtagcgtggcatctttgccttccctgtgcctatgggggccttctctccccttttgccctccaagttccccaatcctgttccacatcctccttttgctacctgtagtctctgacctgatcccaaatccttggggtaaaaccccattatcctaaaagcctaacaatagttgcatttcatttgcatatatttcatttgcatattactaatttccaggtcaacagtgcagaaatttcacacarcaaccccccacccccaccacttgccacctgtaccccagatctggtaggtctgaggtatcctctccagctttcctaccctgttccctcctctagggtgacaaggaggcagagttgggcctgcccttttctccactctgtgaccgcacttccactctagtggcacagtctcagataggtgagtgtcctctcctgcaggaaggggaggactgggagggggaaaagatgctgcctgggtcaggattgctccaagtcctcaatccccccaaaccattcttcctgtagaggaaagcctactgtgctagagcatggggtcctgggttaggaggccagggggctgcaatggcaggaaggagctctctggggcaccaagacatcatcccaaagcctgccctgcattgggaagttttcagccccaggttacctctccatcctctttcataagcagccaggggtcctggccatgccagctgcatgctctgcctagccctccagataatagtaagacatctctacggcattgctcctccactgcagggttcatcgacttcattgtggagcccacattctctgtgctgactgacgtggcagagaagagtgttcagcccctggcggatgaggactccaagtctaaaaaccagcccaggtgagggtggctggggtagccagatatcttggttcaggaaggcagtggtagggagggatttggactcacagagaggaccgactcacagccatggtggggtgstggggaggcagrctgcttcaagcttgggagtccctctgccgtcagggacagaaggatgggatcagaagggtgtgacctgtacctatgctccccttcaccatatttttgtttcttccattagctgtctttctgccttctggctaatcttgttttaattttccttctaccaggagggaagatgtggagagggaggggtgaaatgagggggagagggacagggacttggggaatatctagtagaggaaaagaggaagatgaagttccctgaaccttctcctggtcttccatgtcctgcactcccagggctaaggtggttctggagtgggctggggcttacctcttgcggcttttgggggttctgcttctagctttcagtggcgccagccctctctggatgtggaagtgggagaccccaaccctgatgtggtcagctttcgttccacctgggtcaagcgcattcaggagaayaagcagaaatggaaggaacgggcagcaagtggtgggtaccatggcagagggcaggggtgagaacttgtgtgggtggatcatggagcactaggaggtccatttttcttaagcccctggggaaaccctttgccggactccttgatttgggagtggagctgatcagaccagttagatcacaggaaagactggctgagtggcctggaatgttctaagaatgggggccgtagagatgatagagacagtcagatattccacaacccaagggtccctgtgcacactgtggtccctgtaaatggtgcccctgtagatttggctaatttggtggccctggctgggaaatctcttcctgygtgagggggtggtagggtggtnttgagggttctgagttttagcaaggctggagaggctcttcccaagtggggatgggttgaatgtagttcagcttgaaggcaggttgatggatgagaatcccttacatgtctccacatactccttgggttctggggaagaatacttcttggcctaagctcagcctcctttatgctcctctacaggcatcaccaaccagatgtccattgacgagctgtccccctgtgaagaagaggcccccccatcccctgccgaagatgaacacaaccagaatgggaatctggattagccctggggctggcccaggtgagcctgttgtggtggagggtgtaggagagctggtgtctatcatggcatctttgttgggtcgtctctgggctccagtggatgcgacattctctctccccttttgagcagtaaaatggagcgagtgaagacatagaatggagccaaagtgtgggtggagcagggaaatcctcccacgctcttctgtcccccagtccctgcaggaacaaaggaggtascttctcagaacagcagcagaacagggtgggcccatgccaggtgacagctaacctgcaccgcaccttagggagggttagggaaaaggagcccagccagggcacacagctcagtgagggcagctgaacgtgacttcgacttcagcccctattcacccccttggctgggcacccttctgaagggcattttttgcacagctctactcgggactgagtggggatcaggacttggagaaggaaggtcaggttggaggtgaaggcaaagctcagggcactgaagtttctccctctttccccaggtcttcattgagtccaaagtgtttgatgtcatcagcaccatccatcaggactggctcccccatctgctccaagggagcgtggtcgtggaagaaacaacccacctgaaggccaaatgccagagatttggggttggggaaagggcccctccccacctgacacccactggggtgcactttaatgttccggcagcaagactggggaacttcaggctcccagtggtcactgtgcccatccctcagcctctggattctcttcatggccaggtggctgccagggagcggggagcttcctggaggcttcccagggccttggggaagggtcagagatgccagccccctgggacctcccccatcctttttgcctccaagtttctaagcaatacattttgggggttccctcagccccccaccccagatcttagctggcaggtctgggtgccccttttcctcccctgggaagggctggaataggatagaaagctgggggttttcagagccctatgtgtggggaggggagtggattccttcagggcatggtacctttctaggacctgggaatggggtggagaggacatcctcttcaccccagaattgcgctgcttcagccccatctccagcctgatcctctgaatcttccttccctccctttctgatayagtgactggggcaaaaggagccattgtgaccaggggctgcgggaggcctttcctgggaccttccttgggactggtctgggcccctggggcttgtcgcctgccctgagtccggagccctttgcctccttcctctcccctggggctgggaggctccatccgaccaatgtctgtaaagtgctttgaggatctccccagcaaagcaccttcagaatgtatcgacaccagctgggttagggtcaagggtgcctggggagggtgagtaatcctgcattgctaaaagagagggtctgtcccctcctytccacgtcccagaactggcccagctgcaggcactaaraagctcctcccctgagacaagtgaggggtagtcggtgaaaggcagatggacaaggggctcagggctgctgccttcctgtcctctggagagaacccagccaggcgcggtgccccttcctctcctcaggctcctccttgcccccaccttgccccaggaaaggccaaagtccaggtgactgccctccttctttcttgtaaataccaaccrtgcatttgtacagtgggccctgttcatgcgaaatccacatccatggtctcctagacctgctaccctggtacttccaccctaccccaccccgagaagggcagagacgcatgtgactcacccctgcccttggtttcccagacccctgctayagccagagaacaataaagaagggagaccaggcctgactgtgtgtgttcactgggtacaagttgaccaagcatcttcacatacatacactctttccagcatgataaaatctgggtgaggcgttctccctcatatatatatatatatatttaggtatgtatctgggcaagctgaggcccaggaggaggccccgagggctcatagtagctgcatggcagaagtgggacctgacgcttctcaggctctgctcttgcctctgtaccacatgcttcagcagggagggggaaagaatcttgccttccctcctttcctctctcccactacctgggaaaatcaaaaacagcagcaggagagaggcctggccgtgagatctgagacagtttcttctcttatgcttggttttggtcttatctgggcccctcaatgtctaggacaagggaacccttccagtctccagcatgggcctcttcattaatagccactgtgttctctatccattgttgctaacgggttgaaataagggacagcggtcccacagctggaagagggaacacatcctgaagcttgggaatccaaaaggaaggcagctggggcttggagggcaggcgaggaggtatcggcacaccaccacaccctctttcccatgggccaagtgccatggtgcagttccccttttgtccagcagatggagcccaccgcacagtcacagctggacacggcacaggccttagagcgccgagtcttccagctgcagggcaggcctgtgaggtggtcggatcgttcctcaataagaaaagagaacctggggcttttcttccttcttggcaccctggaagttagtcctcccacctatctgaccctcatctctcttcccacagcaagtaaagtcagggctaagggaagaactcttccctgctcaaggcttctgcctagctcctgtttcttccttcccagaggcagcttggcaggagggtgggggctacagagagggcagggcaagaaggcagggagaaaggattctcccagttggaaaagaaggaaagtgccaaggacctaacaccaaatttatcactttttaaaaacaagagattttccccaaaagtgaaggaataagaaacaaatccggtgtccatgcattcccaaactgcagtcttgatcccaagatacctcctcctctctcagacctgttatgggggaaaggggacagaaagagaaggtgagaggccagagggtcattttgtcccttccccttctggccatcccatttgtcaacatctaatgtctcagaaagcttgttctgatgtctgagagcagtccttcctgtgtccagtctatgcagggggctgcggattatgaaatcaaagctcaggaagttatctcatcaatgcatcctccaggcagggagagccactgcccacttcagctgggcaggtgaggatctcccttcgggttccaaatcccctttatcaaaaaatccacggcctactgctctcacccattccaggagccagaagtcctacacaaagtctaatctcaatccttcttgctgcagctatccatttctttttgtctgtcagaggagatacaagtccttttaccataaagaataactttttagggactgaagctggttctttgttttccttttcctagactccaaatattagccccttgcttttgtccacaatattagcctcctctcctatgacctggcagcccagccctggggtcttaccgagttggctcccttggaatccagtggtggtatatgggttgagggttcttttgtgctgggttccttactgyctctytcgtgagttttagggatgcattctgcagtttctgrggagggaacataggggtgggaggaagaggtggcattcataaaggtgttggggagggaactgcttctcctcactgcacccataccccagtggcccctgagagggccccaggaccaagttgggtgcaatcaggcaagaccaacagggttttctttgatcacaattactactatatgttcacttttaaaaaatcttcaatcaaattggaaagaataaaccctctacagtttaaaaaacaaaactcaatatgtgtctaaacctgacatgaactcataggaggctgtttttagtctttattctgcttagtgagaccattcactggattgcagaaatattatgtgtttgattgtagggttctctgccgggaatactatgcgatacacagtttatgtactatatcttcataaaattggaagcattctgaattctggaatatatctaggataagggacatagcgcactgctaccagcttccacttattgcatgctctgtgtgtgtcgggtgctgtgtcaacagccagtctcatttaatagtcacacacaacccactgcaacaggcaccctcattatcattttataccctgaggttaagtcgttcaaggcctctcagctggtaaggtagcaagtggccgagccaggattctagcctgtgattgctgttcccatgaaggtgggtttcccccatgtagccacagtggggctctgaggttcaagttgggagggcttggtgtcactcagtaaggaaaagtgaagattcaaatatatgccgaacatgccaacagatccatatccttgagacagtttttgcctactactaggcctctcccaggctccaactctttcccctccccgcagtgggtaaggcttgcctcctgctgggctgggaaataggatgcctggggccctccccagcctgaacatactttttgctgtcccagaggtgcccagccttgactccacttctgtgtctgggatcccaggtgggcgggactcctgggttyctgtgctctcagcggccccctcaggttcctctccttgctgctgttgccccaggtgatgttcaaccatcatctggagctctggggacacagagaaagggagggaacactggatatgactgcctagcgtctcccctgtgggcctccggattcaacagccccactaaaggctcagcacacattgctgggtgtttgactttcccatccactgagatctgaacaaggaggggacattagctggcaataaggaggaatgaaaactagaccataaaaagtactcttcttcacagataagggaggcataggagaagaggctttaagaacaagggatactcctcacttgctgggatacatggtcttccctgggggaaggtggaaaggctcaatttagattcaagaaaaatttgagtatcttgtacatgttgtgcactgtgccggtgagttcacatatattattttatctgccataatgaggtagtattcaaggctcagtaagttaagcagtttctcccagatcacccagctagtcagtggcaaaactgggatttcagcctcagttcgtctagcaacagttctaccataataaaggcagatttaacgacctcccttccaaagggcattcggtctcctcttcagcttcaggcacagaggagaaaaagggatgggaggggtcttgcaaacctttcattgtgggtgtgatccttgtcatcttcttccgttgccgtggagacattgccaaagtggactgtgaagggcacagagcacagatgggcgccagcccccccttgctctccagacccctcccttgccctctagccccccatgccctccagccccccttgccttcctcctctgccttgccaggcttttggattggagcctggggtaggtgtgagcttcaaaaagtggggtaagaaaacgcctgcttccccaaccacctcgacaatggtgagcaaggagactgtgagtgtgtgtgtgtatgtgagtgtgtgtgtgtggggtgcatgtgtatatgttcactcatgcacatttggggggtagaggtacagggaagcgggagtcaaaaagatcctagagatgggcggcagggttttaaggaataatcccctaatgaatgtgggggttttttgggctgggcttagtgggatgggccagctcaccttgagatgtgggttggggatccggtcttcatctatctctgaagggaacagggaaaggagagggtgataaggacaggaaaccagggatccccatagagctgacttctcaggggaggggattctgcagccatgctcctcctgatctgtccctcacatctgcccccaggctcttggccctcatggctgccccagacctcctccccgaagctcctctcctgtgcttccgctgcctccatccctctgcatctagtcccgtccttggctctgtggtcaatttgcgtctgcatctttgcctcagacctggagatccccaaaggcaggatctgtagtctttttgctttttttcttcctctgaagtatccatgtctctttctctttccaatcattcccccaccccagggtcagccagaactaagccctgcataggagggaacagtgatagaggacagtcaatttattctgtgcagggtctggaaggtatagctggaggcaagctggagaccccggcatcctgaaccccagcctagcttcttagcctgtccccctcgcttccatactcctgtcaagctctctaccattctctgagaacttgttttctccccagacctcgatggggatgctggtgaccagaatctcagctgctccctgagctgcttctaaccttcccctccccctctgggggctgtgaagagctggtggaggcggtccctccccctcacagctgacactgcctctgggggtgggggtggcagcatctcagttgctggagaaatctggaaggctgttgtcgcagcaaccagcactcagttgaccascccaattcctggggggcttaggagccaggtggtctccctccctttcctagaactgctccatctttccaaaagcaaagaatattctgcaatctagccaccaccttcctgccttcagkactgaggacatccccgccttctcagagctgttcttcttccatctagcgcccatcttctcattgggacctgctgccatagtggcccccacgcccttcagcaacctatcccttggcttacctggggatgactggtcactggtcagcacgagggtggcaggggtggggcggcgcctccgaatctgagggaaggtgggaaatggggaagaggtcaagtacacgtggaagcatcaaagccccacccaaaaccactcagtaacataatccaggctagcctacttaacacacctcaaaaaatgccatgttaatgcagctggaggccattatcctaagcaaacttatgcagaaacagaaaaccaaatactgcgtgttctcacttataagtgggagctaaacattgagtactcatggacataaagataggaacaatagacactggggaataaaagacagggagggaggagggcaagggctgaaaaactacctattgggtactatgttcactctctgggtcaatcatatcccagacttcagcaccatgtaataaacctttgtaacaaacctgcacatgtacccccctgaatctaaaataaaagttgaaaaaaaaatgccatgttacattggtgaaccagggtgaacatccctgggctcctccccctcccctggggagagctaatcctaaggatccagaagaccacctcgcctccctgcatgsccccattcccctgttctgtctctccacctccccctggtcctggccccagctctccatctaagcatatctgctctaatgcattgatctctggcttgctgtccttccgtccatcctggatcaatggtcagaaataacttaagagggcacagggctttctctcagtgttctaacccactccccaagcaagacgttaacattttgtgtgacagcgcctggagagagcatccttttcaagcgccccccagcctgggaggacagcacagaggaggatctgaacgtgcatctcctctggcctgtgcccctcactccctaatgtcctctctgtccttggatacattgcctttctgatttgtcaagaaatggggttgggggaatccttgtcatggtag

SEQ ID NO: 95004 - DNA, 29436 bp, Homo sapiens
tttgtcctaaggtgtttaaaacatgtcaaccttatgtaaggaaaaatttcctggtccaaataaagttgaagtttaagaaaaattgatttgagtgttctgtttttgttttcatgttcttccattagtattttctaatttttgtccttagttagtccatttggaacttcgatgttttctaacttctcctgaatgcttagtatctatcgtgctactgctatgaaattagatgcatgcacttagagcagcagaatgaagagttatcctgcaatgtggaggttttkttaaagttcagcttttagaaagttaggcgtctgggagtggtggctcatacctgtaatcccggcactctgggaggtggaggcgtgaggatccctggaacctaggagttcgagaccagcctgggcaacatggcaagacctgtctctaccaaaattacaaaatttagccggatgtggtggtgtgcacctgtggtcccagttacttggggggctgaggcaggggaatcacttgagcccaggagacagaggttatagtgagcccagatcacccccctccaccccagcctgggcaacagagtgaggccctgtctcaaaaaaaaaaaaaaaaaaaaaaaaaaagcaaaagcaggtggaaacagtttcttgttcctgatttcatcattttaacctgccttgtatgtcttttagcttttcacagcacattctcatatacaatataaaccttcaaaagaagttcataacttcatgaactacataaagaatgtcacaggaaattcattttctaaacattctttgactccttgacaggattttctaggaacatgatctaccaatcaaacttgcattggtgaatccctaagtgtgcctctcgccatcagaacagtgactttactgtgtagtcatgggcatttgtctttttggcatcacgttgggcccatgttgccccttcagaaaccctgaagaagccatttcaagctctcaaccatctttcctgataagaaaacccacttgttagaatagggtcttacaccaatcgcttatagctaaggctgaatttaagtcaaatgtttccctcttctgggagtatacaaagctcttaaactgagatttgaagctcttgacttctgtgcaagcaattttacctactactgagcagatgagtgaagggttgaggctaagaagacttctcagggcctctgaaaatgtatcaggtaggtaggtgggtaggtaggtaggtagaatagatagataaaatgagtaagactgtctcaggatgagggcaactctaagggtcttcaagaacaagtaggttgatgatgtcaggggcttcaaaggaataaaatgcctttggggtacctgtcatagagtgccagaactattataacaggagttttcatttctccccaagcctgtgtaatagcagtcatgctgctaccttagttacactttcaggtgaacaaggctgagtgttacccaaaaaaggtgtcctgatccagatcctaaaagagggttcttggatctcgcacaggaaggaatgtaaggcgagtcacccagtgccatgagaagtaacattttattgaaagctactcagttacagagtagagcattctcagaaagcaagaggaggaatgcctcttctttgtttttattcgataggggtcttatctctgtaaaaggtaagctaagcaatgtctacgtgcgagtgggctaacagaatgaaaaaaattagtactttgttaatttaaagaaaggtatccttggcattttcatgcgtaaatacgtgaaagcatgactataattaccttaaaggtgtttagcattatgcaatattggaacatctggacattctactgtcataggaatttgtccttccaggtattattaagctatttcctcagctgtagacatcttaagatggagctgatttttttgttttttaatctagtttaagttccagaatacaagcgcacaacgtgtagttgtgccatggtgtagtgtgccatggtggtttgctgcacctattaacccatcatctaggttttaagcccggtatgtattagatatttgtcctaatgctccccctcccctcactcccccaccccccgactggccctggtgtgtgttgttcccctccctgtgtctatgtgttctcattgtaagatggagttgattttaaaatgctgtcaccctggctctcctacactcctgtttccctaactctaggatgatgttgcctctattttataagattggacatctgaaactgccatttttgaaggttaaaaacagtaagatattagcaatttggtataattcaaccagttggaactaagcaaatggagacaagtgcttggcttaaatgtctaataaaagcaatcacaaaagccaggtgcagaggtacatgcctgtaatcacagcactttaagaggcagaggtgggaggatcacttgagcctaggagtttgagaccagcctgggcagcatagttagaccccttctctacaaaaactaaaaattagccagtagtgtcatgcgcctgtagtctcagctactcaggaggctgaggtgggaggatcacttgagcctcgaagctgtagtgagccctgatcgcaccattgcattccagcctgggcaatacagcaagaccctgtctccaaaagacaaacaaacaacaacaacaacaacaacaacaacaacacacgatcacaaaagactataagaaccacaaccttccacaatggccattgcagtcttacacaaaaaaatactgggattattgcccttgttattcatctttgcagcaaaggatacttattttaaaacaattatgccatcgtcatttttgtcctttaaaaatctttgttttattttacctccctgaatacacacataatttactatggcatgcatattcctattgcaaaattcaatttccaaataaatatttttaaagagcctctttctgtttgttatttaggttaacataaaaaatctagagatgatttaaagtaaaccaaaggatgtgtgttaagttacatgcaaatactacaccgttttatataagggactggagcatggtctgattttggtagctgagggggttctgaaaccaatcccccacagatactgagggatgactgtactttaaaatatcatgttgtacacagtaaaaatatacaattttatttgtcaattaaaaaataagctccttgagggcaagaactggattttataatttattttttatgtctcagtaaatccagtagacctcagcacagatgttcaataaaccttccttaattataaactaaaagcaagaaaaaaagaatgaccactttcagcaaggctggaaaatatggcttcctactcatgttaaactgagtaattgctgttaaatcagaactagaaatatgattggatatacactgttaagtcttttttgaaaacgacttttctgacttttggggtgcccagtggtccttgacttacctctcttcttaccctgcataccttctctggatgagctcattcttttgccaccaattcaaccgatttcagttctctctactgagtcctcactgggttggtttttgtcttttcggttttttttttatagggagtcttactttctcgcccagcttgtactgcaggggcgtgatcacggctcactgcaacctccgccttccaggttcaagcgattctcccgcctcagcctcctgaatagctgggactacaggaacaggccaccacgcccgactaattttgtatttttagtggaaacagggtttcaccatgttggccacgctggtcttgaactcctgacctcaggtgatccgcccgcctcagcctctcaaagtgctgggattacaggcgtgagccactgcgcccagccctcaatggctttttcaactgtctagtgggtatttccagctggatggttcatagcaacaaaagacaagtcaacccattttccccaaactttgtcttccttctccgctctttatggaactagaaaccaaagcattgctcattcattcattcaacaagtgttctctgaatacctactctatactaaccaggatgtacaaaaggaaaaccaaaagcgcaaaaatcctcgatctcgtggaatttacattctaggaatctacagacaaataaataaaaaagtcctgttagatgacaatacatgttattaaaaaaaagacaagaagtgtgtgtgtgtgtgtgtgtgtgtgtgtgtgtgtgtgtgtgtgtgtgtgtgtgtgttggacagggcatcattctagacttttcttcctcctcccttccctttgatctgattagcaaatgctttaccacctacctccttagtatttcaccttttcttactcatattcttcaaactcatggtgctactttaatttacacagacacaagaggtttctttctctacccctactaccccaattcattcgcctcactttggccagagaaacctattgaaaataaaatctgatcatgttagcggctgcaattgttcagcacccaggcttgtcaagcaaggtactctcgagcgcccccgtgggtgaagaaaataacaacatctatagcctgagaaatagcagaagctgcctctaaaaacaaaatttattttcgaaggcatatatttcaaactttgaaatccatgtgaattttgcaattgttccataatatagccctgatagttttaatatatttttaatgttttaactaacttgccagccaaattattcttttagcaccacccccaactccaaagacccccttccaaacaggtgctgacttgagaccgtgactatagagcacttgtctctaaaatgtacaaaatgaagagaaatctcaagatgtcccactgagatgaagaaagaaagaagaaaatatgtatgtttgtatacatgtatacatgtatatatatgtatacacaaaattagaaaagttagggtctactgtataaattaaataagcgttgacagtgcttttgattttaatctgtatgtggtactttgcctgcttaacacccttatgtggatttcctgacggacttgacattcctgtcaggaaagcattgcgtacttgctgattaaaaagcatctaagggccgggagcggtggctcacgcctgcaatcccagcacgaggcaggaggatcacctgacgtcaggagttcaagaccaccctggtcaacatggcgaaaccccgtctttactaaaaatagaaaaattagccgggcatggtggcgcgcgcctgtaatcccagctactcgggaggctgagtcaggagaatcgcttgaacccgggaggtggaggttacagtgagccgagatccgtctcaaaaataaaaaataaataatgaaaaaaattaaaaatttaaaaattaaaaaacatttaaaaaagcatctaacttagatgggtaatgggtcaaaagaaaggcagactgccacatgcagcgcctcatttggatgtgtctggagtcttggaagcttgactaccctacgttctcctacaaatggaccttgagagcttgtttggaggttctagcaggggagcgcagctactcgtatacccttgaccgaagaccggtcctcctctatcggggatggtcgtcctcttcgaccgagcgcgcagcttcgggagggacgcacatggagcggtgagggaggaaggggacacccgcctagccagccagatcagccgaatcaaccctggcgatcaatggggtgacagatgtcgcagccagatcgccctcacatccgaggtacccaggcggcgcacaagctatataaacctgaaggaagtctcaactttacacttaggtcaagttgcttatcgtactagagcttcagcaggaaatttaactaaaatctaatttaaccagcatagcaaatatcatttattcccaaaatgctaaagtttgagataaacggacttgatttccggctgttttgacactatccagaatgccttgcagatgggtggggcatgctaaatactgcagtctccattggtgaggtcgtcccggagcctcgcccagctcccgcgcgctagagccgcctgctggtctcacccagccgggaccgctgacctggcgctttgtgcggctccaggcctccgagtggactccaggtctgtctccctcctgcggtcgcccccttcctcgccctttctctcttcttttttttccctcccctttactctctgagtctcactctcgcattcttccctcactcccccagttcagtccttctcttgtcttttcttcctcttgtcctttgtcctcctgctccatccagtctgggcagaggtgggccccttggctggagctggggtccttcttggctcagtgtgcgtatttttttttaaaccccttctgcggagtctgaatgcattggtggaaggtgggctcggatcgtccccgggcctggctgggctgccgctacgcccctgcatgggctgagcggggaagacgagcatgggagagtgcgatctcagatggccaagccctggcccccggctcgttttacaaggccgggggctcatctccctgtaggggtggtggacacgcgggacccggggggcgcagccaccgcatgcgtgacggtggacgcacattttgcagacagtagtagtactcggcctgttcaccttccagttgccgtgataataaaatatgatgatgtatgtaaaagcatgaatacttgaagagcttccagtggctgtgcgattttccttcgctaccctcttcaacgcctgccaccccctatcccccagctgaatttggaaaatctgagattctcgaggtcaaaatatataatattctgaatttgtgaaatcccgtactgctagcacatatgtttttacaacaaatggccccagcttcccaagatccaggataagaagtcataaatagaaatcatataaaagccaaggttttttyctccaygttttaaaatggtggtttttttttcttgagtgagggaaaatgcagcaacaaaaataaagaacagtttcccgtgccaaaatcctgaatattcatttcgcccctgagcactgggttgaagacgcgaaattgggactgttggtctgcgacgagctgctgcatttgtatttcagaaagcctgaaaagctatcatggcagcaaggcccaagctccactatcccaacggaagaggccggatggagtccgtgagatgggttttagctgccgccggagtcgaggtaccttatatgctgtttcttcacggatttgtcatacagcttttgagacctttgaaagaaaaatacgttttgaagcaccgttcagttctagttctcgtccaccaaaatcacaggcaygcttcactgagtcagataccatccctgaagggatttttctttataattagaacgtagttgatgsaattctattttccttttgacttttacttaattattggcttctgatctagcaccagtgaatatttattaataagaagaaaggaaatttacctgaaaattgtcagttactctgagctcttattaattatgcattctcagggtaaatttcttgttttcttcagtggcttcaaactggcagccttggtatcttgcttacatatgtgtgtgtgtctgtttttgttttcgttctgttcttttagcttcttagtatggaaattttcaaataccaataaatgtagagagaacattgccatgaattctatgtactcatcacccgacttcagcaatcatcagctctatgctaatcttgtttcatctatcacctcccttcccttgttttgtgggagtattttaaagcaaaatccaaacatcataacatttcatctgggagttcctcaacattttcctctaacagatgaggattttaaaatgtaacaatattattatcacatccaacaaaattagcaattctttgtcatctaaccttcagtctgattgtctcaaacaggcattttgtttgtttgtttgtttttatagtttgttttagtttggatctagacattggtctacgcattacatttaaaatggttatgtttctttcggtattttaaaaacctgtaagtttcctcttcattttttacaaatttatatttgggaatattttcagatttatagaaaagttgtaaaataatacagtccctcattcagtctcccttaatgataacatcttacatcaccatgtcatattacraaattaacattggtgcatgactaactaaactacagactttattcagatttcactgttttttctactaatgttctgggtttttttttgacggaggctggctctgtagcccaggctggagtgcagtggtgtgatctcggctcactgcaacctccgcctcccaggatcaagcaattcccctgcctcagcctacctagtagctgggactacaggtgcacaccaccacgaccagctaatttttgtatttttttagtagagacagggtttctccatgttggccaggctgatctygarctccagacctcaagtgatgcrcccacctgggcctctcaaagtactgggattacaggtgtgaaccaccacgcccggccctttgctaatgtccttttactatcccgcgatccaacattatatttattcatcctgtttccatagttgccaacaatccatgacaatttcccagtcgtttccttcattttaccatcttgacggttttgaaaagcactggtcagatatttttgtagaatcctctacaaattgggtttatcttgtttttttcatgattagactgaggttatgggtttggggaaagaatgccacagaggtgaagtatgttcacgtcatcatattaggggttacgtatcaacatgagttgtcactggcagtattaacctggatcacatggttaaggtagtctctgccaggttgctgcattttaaagttactatgtttccttgtattcttctgaagcagatcatgaagtccagcccacattcaaaatgatgagaattaagctctacctcctgggtgagggagtatctacatttggaatttttatataaggaagatttatctccactcatttcttcagttattcaattctttgtgtcactatagacctaagtatattgattttatattttagattatagtctgatgacttaaattgcctaaattgtttcagctttagccactggtgctctttcaggtttacctttttttatttcagattggcctcttttttgttctcagcactttctgacagtataaaatgctctgtgctcatcttgtattaatattttcccttccctagccctagaatcaggaatttcttcaatagaaaaatggtattaaccagccggcacggtggctcacacctgtaatcccagtactttgggaggccgaggtgggcaaatcatgaggtcaggagttcgagaccagcctgaccaacatggtgaaaccccgtctctcccaaaaatacaaaaattagctgggtgtggtggcatgtgcctgtcgtcccagctactcaggaggctgaagcaggagaatcgcttgaactgggaggcgggggttgcagtgagccgagattgccccactgcattccagcctggacaacagaacgagactccatctcaaaaaaaaaaaaaaaaaaaggtattaatagccaagatctgggtgctagatgtctacgtttgtttctagtgccatttatttttggaagaaactgccctgtagaattttccctattctggatttggtttacttaccctccaggtgttgccttgaggtaacatggtaaagtgaggatacctttattttaacatgctcctctattctctgtacttcccataaattactagctggacccagaggcatgatcacttcaggctccttttttctttctctttaacttttttttkccctgccagactatgtcagaagagatactgtgaacacacttctattgtatcacatcaggggttgtctcgttttcagtgatgccgaccttcatcggtgtgttcctgtgatatcaaccccaatccacacattatagtttctcccatattcttttcaacttgtggttttactagctattgatcatcatcattgttagggattacaaaatggcaattctttcaatttccatcatttcacctatgtttatgaactgtgattctcttctaagagagtacttgtcactcattaactatttaattactttaaaatatgcttcatataggaaaggcgaggtaaatgcttgattataaattttcacaataatgcgttgttgccctagcaacctccaaagatgcaaatgtgagttgttgggttatgcgttttgtgtttgttctttgtttttattttttgcctatgacaacttgccacatggtgttttacaattttctaaatgagttgacatcattttcatatgcaaattctgatttctgacttgtctttagaaattggaagatgtggtgatcctgagctcattttcacagggcagcaattgttggatctgaataaggactgccccacctcgcyctcttgtttcagggtgtgtttgctaactgttaagaggaaagtgaaaaacattcatggtcccctgaacctgctcaacttcacttgtgtctgtcatttttctaacccccataggcttctgagtttgtaattcttgatttatttcataggttttgaatggatgtcttatatatgtatgcaatataaccctttgtcaaatcttctctcttcattctaccctgcccctcctactcacctatgagtcaacatttttagttacagtaataaaaactcaaccctaaataagttaaacaaaaaaagaacatgagtcatctgacccacctaccccagtccaatcacaggaacaggctgatcaggtagagtaatgagcccactcctcagaccagactggatgaagctagattggtctctctcccagggtgaccacatggtttacaaggtggtggggaggggccctccccgtctctttgccagctaagtttgtgctcacatagatctgagacagtcgggagggaccagctggcagccaccagacaagtccatgattctcaatatcccacrattgggttgaacctaaagttgaagcacacacatctgagtaactaggtcactaaaacctactgaaaaacagccttttctaattcagggagttctcaatgctggtcagtcacttaatttgagtcatcattgacattgctctatgttggttgtttcttccatgcttggaactttacttgcccgaagaccccttaaaacccaggcaaatcccctttgagacgtggaggatttacaccatttctaccattaactgggagcatcagttgagcaccttgtccctgcatatatcatataaactttctgagctaaatgtggtggcttgagcctataatctcagcttcttgggaggctgagggtggcaggatcccttgagcccaggaggttgaggctgcagtgaactgtgattgagccactgcactccagcctgtgtgacagacctctaagaaaaaataaataaataaccctttctgttaactaatatgatgttttgacttttgattttagtatgttgtagtacaaatatccagggacaaattcctcaactgaatctatctgagagacaaattgtcaattgatccaggagtactgcctgcactacatctgaccatctaggcttcgagcattgttgccccaaggatactgttcatgagcattagatggagatcctctgggagcattgaggctcctttcctcacaccatgagcacccactctggcaagtagcagaagccaagcctatgatcctgattctgccccacccctccaagttgaatgtttttcaactaaattcaccaattgttaacattttgctacatttgctttctcccttccttttttttctgaattgtttcaaagtagttgcagacatcagcatgtgtcttcctcccaatgttacaggaaaggggtcctgatccagaccccaaccgagggttcttggatcttgcagaagaaagaatttcaggcgagtcwgcagtgcaaagcaaaagcaagtttattaggaaagtaaaggaataaaagaatggctactctatagagcagtcccaagggctgctggttgcccatttttatagttatttcttgataatatgctaaacaatggggtaaattattcatgcctcccctttctagatcatatagggtaacttcctgacattgccatagcctttgtaaactgtcatggtgctgtttgggagtgtggcaatgaggacgaccagaggtcactctcatcaccatcttggttttggtgggatttagctggcttctttaatgcaacctgttttatcagcaaggtctttatgacctgtatcttttgctgacctcctgtctcatccagtggcttacaatgccttaactgtctgggaatacagccccccagtaggtctcagcctcattttacccagctcctgttcaagatggagttgctctggttcacacgcctctgacaccaaggcaaaataaataattgtcctaataaccacaataccattgtcaccaccaagaaaattaacactgccttcacaacatctaatatgcaatccatattcaaattttccgttttcccccaaatgtctatataatggttacacgtctgtttagcagttataacagtttcctctcctctgaaatctacttccaatttggttgttaagtctctagttgattttcatcaacaggacctgacttttttttcatgccttcgactcttgagaagtccaggccattatgttcgtaaggtcccacatcctgaatatacctgattttcaccttgtgtgtagattcagggtaaatatttttggtgttgttttagcaggtgtgactgtgcccttctcactttgttaacaacagaagcctcaggatgtcagagtgttctccactggggagccaagtttgattgtttggttagacagagggtgagagatctcccgatctctccattataaatcgacactttccctttatcataattaagtaacttaattaagtcttctgtaaaaaagagcttttccttcctcctaccttttttttttttagcatcatcatttatggacatagagattttattgttgggtgttataatccataattgacatcattctttttgatgcttaaattttcccagatttggtagggattccccttacagggccctccatgcctttctctttcacatttgagcacttccttgctttctggcataacaaaatcaaccttctcttataggacccctagttccttttagggggcagtgatatttagaaaccaagatgtggatgctaagtctgctctttctctctgcttcttaagactgtttaacttggcattttttgtcctgagcctgtatgatatttacctccttttggagggtgaggatatctttttaaaaaattgatgcataatgtacatatttggggaatacatttgatattttgatacatgtgtatcatgtgtagtgatcaaatcagggtaattaggatatccatcacccacctcaaacatttatctttcctttatggcggaacattccaattctcttctagccattttgaactgtgtaatacgttattgttaactatagcctactgtactatcgaacactagattttatttcttctgtctagctgtatttatgtaccattaaccaacctcttttcacatcccattcctctctacacttcccagcctctagtaagcaccaatcaactttctatttccatgagatccacttttttagctcccacatatgaatcagaacatgcagtctttgtctttctgtgcctggcttatttcacttaacgtaatgacctctgtttctgttggtgttgctgaaaatgacaggattttgttttcttaatggctgaataatattccactatgtatatatacgtttcttttttaaaaatttagtttgatgaagaatttctggaaacaaaagaacagttgtacaagttgcaggatggtgagtatgaaaatgaaacaactgcctctaatactgattttcctttaagagctgctgtttatgtggaagggcaaaagtattcaatgacactgaacattcagaacagtatcctaaaaccaaaaaaagcaagagggaataaatagttgaaattgccaggaaatcacttcttattcaayagttccataaaagctggccgaagggggtgagcagttccttccrcatcccggtgaacarctcctctccatccctttcttctcccctctcccctccaatctcttcctccccctttctttctctcccttgccccttccctccttctcatctttccctacttccttcacactatctgaggcatcctggcctgcttgaagtatgcaaataaatatccccatttacatggggtactttctgaagtaaatactacacagaagtgaaatcaacgaactgccccctcccttcacctttaattcctggtcagccctgctccctccttgcccatccattatagcaggagccaccagcagacccataaagaatgcgcccatcaaccctgtgagcagcctccctcccagccaacagcagggtcctcaggcccagctggaggctcccctgtgtggtaccggctctccagggctgtaaggccaccttttgtgtgtgacggtggctggaagccactaggcatgtgctaagtactcctcttgcctctcccctcacctgctccgaatgctcaaaccctcaaggccaagctgtaccctataccggcatctctccccagggtttggtatgtggaaagtgttggattcaggtttgttaaataaaacaatgggttgtttttttaactagtgacagcaaacttggtagtaaacggtctgttctgtggctacagagtagccatagagtatacatgagccaaagagtatacatgagtctcagctagttacttaggtttcatgatcagattctctaaaaacagtgctgtccagcagaacattctacagtgaaggaatcgttctattctgcattgtccaatatggtagccactaggcaaatgtgactgttgagcacatgaaatatgtctagtgcaacttagggactgaattttaagttttaaaaattgtaattaatttaaatttagatttacatagctgcgtgtagctggtgactgctgtattggccagtgtagcactgaagaaatatcttcactacattcccctcaatcccttatcactgtggataggtatttttcctggggtgaaaatgaaaagggaacgtttataacaatgctagttttcagccttcttttttttttcgaggtagagtcttgctctgttgcccaggcgtgcaatggcrcgatcttggctcattgcaacctccgcctcccgggttcaagcaattctcctgtctcagcctcccaagtagctgggacaacaggcatctgctaccacacccggctaatttttgtatatctagtagaggcggggtttcactatgttggccaggctggtcttgaactcctgacctcatgatccgcctgccttggcctcccaaagtgctgggattacaggcttgagccaccacgcctggccccttcaggcttcttttgtggctaaatctgctctcctgaatgaagttaaggttatctgtcatctggaagctttacactatttcctaaggccatgattccaccgtttcttttcattccacagagcattttttaggggttgggggacagagaagaaaagatcacttctaactctgggcttccattctcaggtaaccacctgctgttccaacaagtgcccatggttgaaattgacgggatgaagttggtacagacccgaagcattctccactacatagcagacaagcacaatctctttggcaagaacctcaaggagagaaccctgtactgtggcccctctcgagtgttgtcacttgtcagcttactgatgccttagctgattagcaacctctgtagcacaccacatttactttatgtsttacatagttagtgagatcagggaacaaaaacccaagaaggtcacgaagaccagttggaacttcagtagagagagtctgagtaaaacaaaagaataggattcagatattgaataytatatctagggtgtcattgtttcagatttcaacatttttaaatgctttgatactgctttttccctttcttgcacattcactattgttaagtattaggaatgaggagctgctgtgacattcaaggcctgggagagtgagcattagattataatttgaaatcaaagcctggtccttgcaccccttagatgtatgaccctgggcaacgtgggtataagaatagtacatttctcatagtgtcatgtgatttaatgagataatggatagagagtgtttagcaccatgcctggtacactctaagcactcaataagtggtattcactatttttataaagttgaagtttgacccatacgaagagaccaaaacatggatgctggggtaaaagtggaggagtaggatgccaggagagagagcactcatgactgtcaagctgtctgatctgtgacagatttttctgagttacaactagaattgaccttatatctttgctcttaagagacaggtataggtaaatgcttctagggacttaagttgcagcatctttaaaaaaaaaaaaaaaaagcactctgaattcttagttgtggaaactgatggcttcaaagagaggagaaactgagacaactgcttttttgttttaaggattgacatgtacgtggaggggacactggatctgctggaactgcttatcatgcatcctttcttaaaaccagatgatcarcaaaaggaagtggttaacatggcccagaaggctataattagatactttcctgtgtttgaaaaggtaggtggcagagatgcctacatacacagagcaaccaaaccacaaaccacaaagaagctgccacaaacacccttttctgtccaaggattttaaaactgagcccagttgaactaacmtaagcgctaatggactcctaagagcgaatagtagccacagcacaaagctggtgtcttagagccccttggactctgctaggaccacatgattcagaagtctagaaaaagtatgggctccctgcctttgttccttattgttccttgcattcaccaagttcccaccttgtgtggatacagcagaaacttcagaagatacagaaaacaaaaactacctcattcattcattcaacaaaagttgtcraacagctgtctcwgctgacatcctccctgataattygatatgagtagaagaaccatttccattttatttatcttccctttgctctttttgtttttggttttgttgtttttctcttcttgttatatctgcttttctgagcttcaaattctttattcctgaactgggaggaacttttttagtgtttcaatgcaaacactaaagaagagggtgtgaaaatatgggaagacctatttggcaagcttcctctgaccatctttatggaactagatttaggaaaaaggagaggtattttctggggtttctgtagctaggttttatggtatctttcccacaggcactttgtgaatgtaaaataggataatgaagaaatgtggtctggaacgggcacagaggacctggtgctttggcaaaggttcactgctcattcttaggtcccaagggcccagactgtgtcagggtttcttgcaacacgcctatgaggtgagaaccgttgtcccttttacacataatgaaatgaagtcatgaagagattcagtgacctgtccaaggtaacatggccagaaaatggagagcagggttggaactctggcctctgactacaaattcaggatgcattgtactatgccactctggctccagtagctatatttgacctggaattgtgttcggagtccctgtgacacacacacttgtgcacatgcagayacccatgggcatccaagagttgactgtgaaggggatctcccctttgctacyactgcttcttgcctctccctaatcacaatctattcttataagccccacacctatacgttaccctcagaatgggagtcaagatgaactcaagcttttcattttctctgttttgggacatgtaagaggaagtctaattttataattgggttgagtttatgactacacctcttgatgttctagcarcagaactgggaaataagagtgggccccttgaagatgatctatcacttagatttcttaaatcaccctgcccctccccaagcctcctgcatgcatttctgtagatacatttttggagtagatatatcctttcaaaacaccagatgctaaatccagaaataaggaattttcccttccccacttcaatgtctcattcagatccacagcagatatttaaggatgctttcatttccacaccttttttgtactttctctctctctctctcgctctctctctctctctctccccctctctctcactctctctgtcagatatagggtgcgttctcttaattgatgttatttatgaaagcatgaaatgacaaggtcatagtttcacctcttctcagatactgcactgattcaatagcctcatcastctctccatgtggaatattgtaactgatgcacaccatttccctacagattttaaggggtcacggacaaagctttcttgttggtaatcagctgagccttgcagatgtgattttactccaaaccattttagctctagaagagaaaattcctaatatcctgtctgcatttcctttcctccaggtaaataaaactatgtattagaagattggcctagaactcttgggccttccttcagtgtctrttgtttggttggctttggggagtgtgtgtgtgtgtgkatgtgtaatatttttaagattctagtttggcaaatgaaatgaaagtaaggacccaaagttatttttctggtccttaaatccttcaagttgaaagatcattgaagtgtaaaattttttttttttaaggtgggatcttactatgttgcccagaatggtcttgaactcctgggctcaagagatcctcccacctcagtctcctgagtagcagggactataggcatgtgccagcacacccagctcagaaattttcatcttaattttgttccataactgcactcctggaaaaaactccatgcacagggagtttgcctcaggggactttccatagaaataaccatagagatgaggtggtctcacactcacatgtatctactgatggaatagtgggcgagataaacatcaaaacagtctcattcatcaggctatgactccctttctcagaaatagtatggtctcaagttaggaaattctaagcctgagctctgagagcaaatgaragatgttrgcaccctaaacatcaccccaaaggatwcctaccattctccttctgagaattccaaggaaagacttgtgtggttcaaattatccctcagkgttattctggcaggattgatcatagaactttaaaggagagaagggcctttaaaaaaaaactcatttaatgacttcaatattcacttgaggaagtagagacccagaataaagaaatcagcagccaagctggcttaggcagtggatgcttgagttttatctagaaccttagccttttatctccaagtctaatgtgcagactgtaactyctgggccaaacctggcctgccacctgtttttatacagcttgtgagttaagaatartttttacatttttaaatggttgaaaaaaatctgtggaataatatttmatgacacataaaaattatatgaaattcaaattctagtattcataaatttcattggtacaaagccatgcccactcatttacacaatgtcaaggttacttttgtttttctacagcagagttgagtagatctgatagagaccatatggcctgcagaacttaaaatatttgctgactggtcctttatrgaaaaagcttgccaatccctgaaacagccyggatacagaccaaattgctatatgtttgaccaagttatcaaaagccaagagagatacactaactctccaaagagtaacacacatacttaaaacaattttttgccaagtctattaaayattttgatatactaatgagagcaattaccaccagttcaataagtacacccagaaaatgagaataaaaatcttcaacaaggcaataaaccaccatatcatttatgttatagtttatatttttttttcaatttttttttcatttacttttgcagacacagagattgactttccttaatttgattttattcattcagaacttaggatacttttcacctgaagtattcttttgcactgttaaaaaagttacttgtttagcagagaagggaaattagaggaagggatctgcaacttgttgagtgccagcttcattccagtcagtctgctaggcacttacatgcatttgctcatctgtcccgtcaaccccaccccaataaccctaggagatgggcttcactatctccattttacagatgaaaattaccagcttggaaacattacattctgcatagttgcaagactgtggatgactgagttgggagccacaggggagtcagggatctaagtctgtactctttccactagactgtgtggtttctgagaaacacatttagaagtactagaagtacctttggccccaaataggtgggatgctgaacccagaagtaggtagaatgctaagcttattaaaggtgaaatctaggccsggcrcagtggctcacacctgtaatcccagcactttgggtggctgargtgggtggatcacttaaggtcaggagttcaagaccagtctggccaacatggtgaaaccccatctctactaaaaataaaacaattagctgagcatggtggcatgtgcctgtaatcccagctactcggaggctgaggcaggagaatcacttgaactggggaggtggaggttgcagtgagccgagatcatgccactgcactscagcctgggtgacagagcaaaactgtgtctcaaaaaaaaaaacaaagtgaaatctttccaggcatgcatatatatacatgcttgtgtacacatagacacacacctcacaggcagtaaagtacttttcattgaatggacacaaaagattttaaaagtctagggtaaatgatagagatcaaggttttttggtaaactgtagcaccaggacctattggtattttacattgatgatactataataacaacccttttttaagccccaagcwttatctgcgtaaatacagttttaatctgtgatcagattgagcatcaatattttaaaacttcagaatcggacaccagatctgtgttgaatttaaagggttattcctgtgttgattaatggatttaaaaagtcacaaaaattttactatactttgataactatgaaccccagataaatcttgaaacaatacatcatttggaacaagattctaaattttggtataatatttaaaatcatacaagtagagcttaagtacgtaatgaaaagagaaaattgtcatatttatatataattaattggcatmattattagggtttttgttactattagtgacgtatgtatgtttgtgtgtgtgcttaattaaggctgtgccttgcacataataggcaattaataaatagtagctatttaaaatgmcctcttcacttttaaataaatggttttatttaaatatctttaaaaggttttattagaataattatatatgatgagcatatgcttcttcatatagttcagatttttcattagatcaaatgggcttttcttctcagttactgagaattggtaagatttgattctgtgaatgaaaaatacaatgtttttcttccattccagtttatataaatatcyggtatmtgagccagaggctatgaaaaaaatgcaactggctatttcctgcacatagccagaaagaggattcayttactgataggagtaaaaactctgaagaagctgaatcttaagatataaattgtaccatctagtgactttttaaagcacctttacttaagtggctcatgcattttctcccagcagatcagtgcacttcaggtggctagtcygagtggtgtttacagctaattgatcacaaccagttacagatttctttgttccttccccactcccactgcttcaaattgactactgttaaaaaacaatacaaaacaatacactggaggtgttttcagtgagttttccccttccttttttttcaccttaagtgtcataattctattttgagtatgtttttacttttgccatttctgtaaagagtgcttacctttttgtgaacctggagatttgtgtaaacyctgatcttgataccggtgattgatgacagagattgtawataatcatagagatcagatcttaacctagccttgtccaacccacagcccgcgggctgcatgtggctcaggacaactttgaatgtggcctaacataaattcataaactttcttataacattatgagatattttgaggtttttttttcagctcattagctacctttagtgttagtgtattttatgtgtggcccagtgaagccaaaagattggacacccctgctaaacaaatgctaratttcatttctgcttggaactcttcaacaagtatttattgaacaaaytttggtgggccattttgcataaccatatcttcgtagtatctaataccytttttgttagccttaaagttttggttttcctttttcaggaatacacagtgaaactaagtaatatccctacaattaagagattccttgaacctggcagcaagaagaagcctccccctgatgaaatttatgtgagaaccgtctacaacatctttaggccataaaacaacacatccatgtgtgagtgacagtgtgttcctagagatggtattgtctacagtcatgtcttaatggatcccagctctgtcatggtgctatctatgtattaagttgggtcctaagttgggtcttttgtgtcaamgagatcatctcttctagaaatatcaaccttttttgtccagtaaataattgttaggggatctttattggaaaacttttttggagaggctggtatttaagttagatctgattgggctactcatgtcctgtagccagttcatcctcataataagaatgggcaggatctcttgttctctcctgagtgtctttctactctcctgagcgtctttctgctctccttatcctgttctcttatccttatcccctccagtctctgcctaatttttagtgtttaataacaaccgaatgtctartaaatgactctcctctgagctgtaataaataaaatggtagtaatgaatgcaatcagtrttagccaaaataaagaatttatgagtcattgctcattgtcttgttgtgagaattttttaattagtttttttcaaatatagaatacatttgcacggttcaaaaatcaaaaaagtataaaagggtctacagtcttggaagtcttttcaaccctgcttccccgcaaccgaatcctgcttctcacaggcaaatgcagttactatttgtgtacccttccagttacatctgacacatgtataagaaaatgcaaatatatattatttttatcttcttactacccaaaatggttatttgtaggcttctaattttttgcatttcagaactaaaagtatggtctgttaatataatgctgctgttaaactggtgttgattcacgtctcaaatactcatcaagcatcaactgggctcagggtctcccagcactttaggaggccaaggtgggtagatcacctgaggtcaggagttgagacacctggtcagagtttgagaccagcctggccaaaatggtgaaacctcatctctactaaaactgcaaaaagtagctcggcgtggtggcgcacccctgtaatcccagctacttgggagcctgaggtgggagaattgcttgaacctgggaggcggaggctgcagtgagctgagatcatgccactgcactccagcctgggcgacagattgagaccttatctcaaaaaaaaaaaaaaaatactaatcaagcacctattacatgccaggcagactgccaggaggcagaatcgtagagcaaagcccctgctttagaagaattcagcatagggtagggggagacacacatgtaaacagcagaagtaattttaaaaaggaaagaattgccgcttttggagtatctactactcagaaattttaaaactaaggaaaggcaagtttttgatgagagtctcactcatttatctcgctacagaagggattttttgctcagtggaaacaaaagaagaaaagacaagtgggaggtgatcattgtctgatgcaatcaatactgttttcgtcagaggaaaatcaagcgcaaacatcaaggcagtgatttgccttcatatttacataatgtgagcactctgttatcaccctgatatttaaaattcctgcaagagcaaaagcctggtggcaggggcagccccgaggcaggcctgaggaacagtgctgacctaggctgctgttctgagaaagaggcccagccctggccaggcccctgagtgcagtagccaataataaaaaaagaaaatgggaagtgtgtagtaaagactttcaccctgccccaacagaggtgtggcctttgcttctggaaggcagtctctaagtcctttgaatgctagacctgacaggagtgtctttgtttgcctgggggtcttgggccacccagctagtaacaatgtgatttagggtgagagctttgagccacaccagcaatgtgatactgggtgagagctctggttcacgtggtatcagctcaactctggagggagtgaaaacagatcacctgttgggcagtcagccaggcctacctgatggacccccmagtaaaaaacctaggctccaaggcttgggtaaacttctccagttgacaatacaccatgggtattgtccttcgaatgaatcatgaatcatccaacctaagggtggttcccctcaaacttccctctaaactcttcagggaagataaacattttacacacatttagagactatacatgagaacaaacagttgacttgacaatcctcaggggtctgtattacaggtggagcagcccaaatctgaaatccgaaatgctcagaaattcaaaatgctttaaaatccgaaactgagtgccracatggagctcaaaggaaatcttcattggagtattttggatttgggattttttggtttgggatactcagccagtaaatataatgcaaatattccaaagtccaaaaatgttctgaagtcagaaacacttctggtcccaagcatttcggataagggatactcaacctgtactgagttttgtgggatggcagcaaatttgggctagtttatattactgtgttgctatttttactacccagtgccactgcctgatacttttaatcaagggctggctatatagaccttaaaccattttgcaagtacttgctgcttgggttttaattctcttagacacaagagggcccctgaatctggttctttgaggaaaaaaccagggaggaagtttggcttctgcattgaattaaaggattagagaaataaaaacaagagaccaggccctctccaacaaaaagaggttcccatgtttctcgtgttcatggttgcatgaccttaaattgtgcaattcgctttccatattggaaaccagcaccctcctaccctgttctgcctcaggtggcattaccccagtttcatcatttccttttttggtgcaggctcccaccctttagtctcaaacctccaaccaccaccatcaccattaccccccacaattttcatgagttatgagactttgataatagagtaggaagtcagggacaggatcgtttatcctcaaaaaatatcaacatgctgagcattcaaggctaaacccaaagtcagcatgagtgagacagggtgcaagaaagagcagaaggaagacaagaggttcactgagtaaaagccacgacacgtgaaccaacggggttaaagtgcacagccatgcctaaatggggcagttgcagaggcttcagtgtcaggaacaaaagaggaaaaatggacagcttgggaccctggtgtctaggacagaagtgccaagggacccagaataaagccacactttcagagaggttttggcagattgagtgcttgaagaaacacttgactctgactctcctcctgtcctcacctggccgaagcagttctgcaggggccaacctccctaggggatggaacagagcagaaagtgaatccctcgggacaggggctgcaacagacaataaccagtaggggcttttgtatttgctgttgttccctcatggctgaatgtgcattttattcctttaacccaaataacaagcctcagaacattgcatggcaggctcttattcctttagtgttaatatccccacgtgaggggatccttttctgaccataagatctacagagcttccccgccccccatccccatacaccaatatacctctctctctctctctctttttgagatagagtctcactctgtcacccaaactggagtgcaatggtgcgatcttggctcactgcaacctccgcctcccaggttcaagccattcttgtgtctcagtctcctgagtaactggaattacaggcatgcaccaccacgcctagccaattttgtattttaagtaggcacggggtttcaccaagttggccaggctggtcttgaactcctgatctcaagtgatctgcccgcctcagtctcacaaagtgctgggattacaggagtgagccactgcgcccagcccccacataacccctttcttatcctcttattttcttcatagcactcagcaccctctggcatgcttatttgtttaatcaatctgtgtctctatatatgaaatggcttccttgtatatgcacagttgagtcttgtttttttttttttaatctactcatgatagtctttgtcttttaattggtgtatttaagaccattcacacttgaagtaattattgatgtagttggatgtatacctaccatgtttgtagctgtttcctattgttgctcctttatttcttttttttcttccatttgtatggtgtattagtctagagggacagaactaataggatatatatatatatataaagggtagttaatattaagtattaactcacatgatctcaaggtcccacaataggccatctgcaagctgaggagcaagaagagccagtccgagcaccaaaactgaagaacttggagtctgatgtttgagagcaggaagcatctagtgtgggagaaagatgtaggctgggaggctaggctagtctggtcttttcacatttttctgcctgttttatattctagctgcactggcagctgattagatgtgcccacccagattaagggtgggtctggcttttccagcccactgactcaaatgttaatcttctttggtaacaccctcacagacacatccaggattaatactttgcatccttcaatacaattaagttgacactcagtattaaccatcacatatggttatattatttatatgattccattttctctcctctcttggcaaatcaattatacttttttaaaacatatttttagtggttgccctagaatttgccctagtatatattaacaactaatcttgaccactttcaagtaacactatatcacttctcaaatagtgcagctacctcataacacagtgctcctaattgccccttcccattctttgtaactttgctttcatacattaactcatacacaagttataatcatccaatacattgttgctattattttgaacaaaccacattaaaaaatatatatgtactgcttgtcctcctctagaatgtaagcaccacaggtgcagaaatgctgtcacacctacctttatagagccaaatcttaaaacaatgtctggcagaaaagggtattcagcaaacaattgttgaatgagccagtggaatgttactttcttcttagttagctcaatgtgctataaaatatttttttaaaaatgaatgtaaagtgaaaccccagaggtgtggcccaaactggaatgactgttggttgatactttgagcaggcagagctttcaataggaaaggagagggttataaaccctcacttaatctcccctcagcaccctggagataagagcctaagagagaaggtgagtggtgaagttcttatatactcttttgggggcctggttggatagttataatattttactgcccaattttctacttatactcagcaactgttttaactttgtggttaatttaatgcttagtatttccaagcctgagtctatcaaataaacagatactgttttctgcagagtagataatgtaaacgaaaaacagccaatgtacgtgtagacaagaccttttgaaggtttttattgtctatgcataatatacatactatcagacgtattaaaatatccccatacctgcatcacacattacatgtaattttaaaaataagtatttaagagttaagtggtgtttcagttgattgkttgacataatacgcttagtagaatttaaaaatacttactatttggaccattacattttttccatctcaagcaaatgtcagataattttgtacccagttgaaaaggacataggccccagccacattgtgccatggtgtctaacgggtaaactaagtcttcctgcacctacagatctactccatgtatgcttggaagatttaattcaaatgatctgaccctggggtcttccttcagggttctacacccccagggaactatgccaagatgagaactcaaaaattctcacacaaatttttctaggactcgccccagtctttcgacagcaatgagccatgtgatggctcactttatttattctccaagaagtctcaaaaacctgggtagataaaagtctctttcttgactcagatatatttttcatgtaaatatgtttgtaagccttggaggtataagtcaatctcttgtgagttttggaaacatgaatcaatccattaggccctagttgaaaggaaatttagtttccgaaaatgaaatatagtgctctctggagaagatgctttttatacaagcttgcaatagacctccctccttaatcattttacaaagtaagtgaccatcacctcctccacagtaatattgtttggttggttgtgtactaaaagtgccatgtaaatacttgagatcttttttggaagggcttgttccatgtaggagaccatgtttgctggtagcatgtcaaacccaactaattcagtcttttgttaacatgtcatatgttagaaaagtagagagaaataatttataatcaa

SEQ ID NO: 95005 - DNA, 59740 bp, Homo sapiens
  misc_feature (1)...(59740): n = A,T,C or G
ctggaatgcagtggcgtgattttggttcattgcaacctccgcctccctgttcaagtgattctcccacctcagcctcccaagtagctgggattactggtgcatgccaccacacctggctaatttttgtattttaagtagagacggggtttcgctgtgttggccaggctggtcttgaactcctgaccccaggtgatctgcctgccttggcctcccaaagtggtgggattacaggtgtgagtcactgcgcctggcctcaggtttactttagaatgttcttggcctagaggagtggtccattcaggtagttggagggcttagaattttatttttggtttacggatattagggtattgctcattattttccatctttctagatcacctcccatatcagctgctcaaacctcatcttctacattcctctttctttcttcaaccttcacttagagctcaggtcctgagatcagacttgagtgagatttcctttaaactaatgggaggaggtaagtaactgtaacatacaaagatgaataataagtacatgaagaggtgggcaccatggctcatgcctgtaatcccagcactttgggaggccaaggcaggcggatcacctgaggtcaggagtttgagatcaacctggccaatatggcaaaaccccatctctaccaaaaatacaaaaactagggccaggcacagtggctcacacatgtaatcccagcactttgggaggccaaggctggcagattacctgacgtcaggagttcaagaccaccctggctaacggtgaaaccccgtctctactgaaaatacaaaaattagcccggcgtggtggcaggcgcctgtagtcccagctactcgggaggctgaggcaggagaattgcttgaacccaggaggtggaggttgcagtgagccaagatcatgccactgcactccagcctgggtgacagagcaagactcccgtctcaaaaaaaaaaagaaaaaagtacatgaagagccattatactatgttctctcaacttttgtgctttattggaaatgtccataataaaaagttatctttaattattctccagtgagaagagtgagtctacaggactcagatatcactcgccctgtcccaacacattatcatggcgtctttatcttctataagaagacaatgagatttttctaggaaaaaaagctcaccacttcccatgtgttctggatcccaacaagtcaggtctcctgagacattttgcttctgaaaatatcctttcttgttcccacatcttcaatcttgcccccttttgatgcctacccatcttctttagcacactcaaacttctccatgttaaaaaagttcttcacttgaacttcacagaccttttgtaactctacatgaaaacaagcacatttatatttttcaaaaatccatgtaaactaaaaattggcttggaaaaggtcaaaagagtttccttgcttttttgacaatgacaatagcacacctcagcagcatgtattacaaatagtacacgatacaaaaagatttgaactctttcaactaattttagtaataacatcagaaaatgtttaggctggaagggaaactttatctcctccagactctcatttgtacagatgagaggaaaggactctccaatgattatcacaactttgcttagattgacccagcaggtagccctctgagatggggccaaagccccagtcttttggctactgctcttccatcataaagcccccagggatcttcttgaataagatcaagtcaaattccaagtacaattcaattgtagggagaaaattccttctgtatcttttgttgtttaacatgtacactgaagttaagaaataactaactatttgttttcaccaattaagaaatttaacattgggaggccgaggcgggcggatcacgaggtcaggagatcgagaccatcccggctaaaacggtaaaaccccgtctctactaaaaatacaaaaaattagccgggcatagtggcgggcgcctgtagtcccagctacttgggaggctgaggcaggagaatggcgtgaacccgggaggcggagcttgcagtgagccgagatcccgccactgcactccagcctgggcgacagagcgagactccatctcaaaaaaaaaaaaaaaagaaagaaatttaacagacaaaaagcttaaggacttcacaggcagatccgcgggttttggggaaagggtgtgtcaagggagaagaaaggatgtaatgaaggttggcatcaagtcccaggaagaatcacactgaaggcagccaccagcttcacccaggctaagtggtgtagtagacagctttgaaatatcactggagttcaaaccccagcttagccactacctgttacttagtattactggatctcagttgcctcacttataaaatgtggcaaagattagtactgttttacggataccagctcaaagtgcctggcatagaatgtgatatactgggacccaagcgacagaccaccaaggtcaagggatactcaagccaaagagagcggtaaaggcaggggcagatracctagaagtgccttcctcagagtcccctaggcactctctctgttttccttatttgatctcgcgaagccgctgactcaagggaaactgggaatggcgtgaccacagagaaaatgatgtattttttggtccttggaggcccgaaacccatcgtgtctgaaacgactgcggcaatcctagcagcagcagcagcccagaggtcaggagtgatggactgagactttgccctaagaagcctcccccagattgacctccggctcggagcccgcacaaagcgctgagtcacggggaggcggtgccgcgcgcgggggaggcgggcccgcgcagtcacgtggcgggggctgtatcacaacaactgcgcggcgtgcgccgcccgcggcccacaccgcttcctcccgcgacaggccggctctccgagcatgctcagcttggcctcacgactgcacggcgtccccccatgcggatctccacggtccaggttttccggacggctctgggggcggggcctgtgttggtccgcggggctgcgaggcgaggttgcggtgccagggcgccgctgggcagagatgggttcctggagagcgggtctcgcgtttttccgcggaagacactactgggaatcggcctttggtcatggtctagggaagagctgattctgcaagatatgagctccttctttccccttcagctatcgttacagccctgatggagctgtctgctgaaaactcacttccagatgtcgaaacctggccctgggtgcagtctacagaatgaaatcgagcagtagtggacctatgcaggcaaagcattgtcagaggggagtaactcttgttaaatatgacttcagttgatccgtgatgggatttttgttttttctttgtaacagaaaaggctaaagacactgagagatcaaggtttaaattgggcataactgccctgtggtgcagcagcgccggcgccctttttgggattgtccaaagctctgggacccccgctgggggagctggttcagaattcgggggggtaggatagggtgagggaggtcccttatgtgagtgtgagccgggatctaggacagagtaactccaattacagtgttaaactcttactaggttcagtgtcgcgtagggctttggctagactagaatttagtctattattgaaccgcccaggtccatgattcctaacaggtgcatgggaaaagtgtatggtgtgcagcaggtgtatgggaaaactgctttgcaaagtgtaaatcaaggtctacatcagtactgtttcaataaagtggaatgagagccacatatgtaatcttaaatttttcagtagcctcctttaaaattaaaaataaaagtgggtgggggtggtggtaaattaaataacataccacatcatatttaactcaaaatttccaaaatgctatatcgctatgtaatcaatataaaacttttaatgagatatttacatctttttattctactgtcttagaatctggtgtgtgacttacactcacaacacatctgggccactaagttttcattggaaatacttgatctgtaattacatttcataaaatttacagtcaaaaatggattcacatttccaacttgtttcaaatttacttaaaagttttccagtaactgaatggaatatcagtttttaaatttacatttaaattgattaaattaaaatgaaaatttggtttctcggtcatgttagccacatttcaaatgtacattggccaatgtggctgatggctgtcgtgttgaacaatgcaggtctatgagaatgtcagatgacattatgagaataacccaatgatccttggatgtcttacctacatgggaaacactgtttctccccctctcccactacctgcttttcacggagaagctaacatttattaagcacacactctataccaagcacttttctagaattaaaggtacaaaaggcataagtcatctgtgccccagaggaattcactatttagtgtggagctatctttaaaatgactctatcattaatgtacgaatgcaaccaaaacacagagaggaataactgtgactcaagagatgaacatgagtgtgtcagatggagaatttcaagcaggaaaaacaacagagtgccagaaccatatacagatctggtgaggttggtgggagggcaaaggaggttgttgaaaaggctgtggaaaaattagaatgtggtttgatttctatcccacctgtgtgatgaggatggaaacatcttctcctgagcttcaaacatccctaccacacacagacacacacacacagacacacagacacacacacacaccattgtggaaatcccagccagaccttgggtattcatgcccccaagccctgtgaggggcacatccaatatgaaggctgtgggagaagagaatcctgctatcatgtactcactcatttagcaattaataagtgcttactaaatgttaactctgtagtgcgagggaagagggtatgataaatacacactttctgggtaggtacatgtatgatctagttgccttcacttttcccctgacaggtcattgctctgtcaacacatatttattaaacaatcacttgggggcacggtacctccttcctctcctttccctccgagataaggccaactctaggtgttcccactatcttcaaccccaccccacggtaggctcacaagaacgtcattttgatcacttaagggatgaattttaggtttagatggaggataaacttttggagatggttcctcatatggtctgtctggagactttttgcaataaatggtgtccgtgccatccagagaacataggtcaccagttaatcaagacagtagggaataatgatttacacatgttgacaaattgattcctcttaataaccaggtcaattttttggccaacactatacacatgtacactatgcacataattacgacatctataaaagatagaattaatctaattttatgcagatatgggaagaactcgtcccaagtctcacagtcagtaagtgatggagcctagagttgaactgtttcacttcactaccatgttaatacttttctcaacacattctgccgctctcactctaagtgtgaggccctgtccaactaaaacataatatggtgagttcgtcattgattcaaataatcaactttcttcccgaatcccaagtttatctcttctgattaggaaaaaaaatgcattttgatatgtcgcgtttgcgtaaagcgaggccgaccgcacgcccccttctcgcgagctgctcccctcaactgcgacccaatcacccttgcacacgcctcctgagcccccgcggttcccaccgggcttcaggccacgcctccgccgctgcaccgcctcctctccccgccttcgcccgtagtctataaaacctggagcgcaggatcgcgcccaggagcggcgagctagcggacgcaaagactgggcatgctccgcggcggcgcaggttttggtcacaagtaggaagaagccagtgcaccagaccggcaaagagaagcgggagccgccgcggcagcgcggccgtggggtccgccgccgccgcatcggagcgggaggaggagcagcggggagggcgaggccgccgggccgagagccgtcccgcctgctctcggtcttctgccttcgcctccgcgcggtgcgtcggacccagggtctgtcacctgggcgccaggggccgccgccggggagccggagcgggcaggaccctccctccgccgactgcggcccgagagcgcccccgcggggtggagcggcagccgccttctgcgggcggctgagtgtccgtctcgcgcccggagcgggcgaccgccgtcagcccggaggaggaggaggaggaggagggggcggccatggggctgctgtcccagggctcgccgctgagctgggaggaaaccaagcgccatgccgaccacgtgcggcggcacgggatcctccagttcctgcacatctaccacgccgtcaaggaccggcacaaggacgttctcaagtggggcgatgaggtgagcgcccgcggtccccgtccccgccgggcacccgtgtctggccgcccgcgctgcctttgtcttgccctacgcccccggccctatcgcggtccgcgttctccactgcgcccgggggtcctcgagcgcctcccggccccgggagcatcgtccctgctttcgcctagtccgcgtccagggccatcctcctgactagactcctttcttgttcattcattcttttgggttttccccttcattccataaacacggattgggcgctgggagggcgtgagcatgaaaaagtgacattaggtgctgcgagtcttcaacctagtgtatctgcagaccggcaactaccatgatccaccttacaggctcaaaattcgcttttgcggtcaatatgaaagagatttaagttttcctagtaggcctgctgcttttagaaatcaggtcttcaggatgtccacttctgccctacctcatgcaggtgtcttttccttaaacctctccaacttctcatctyccctcccctccaaaacacacacacttcatagctataaattgaaaccagtaaattacggctcagtttcctacatgggggaggaaccttccctttcctgtttaattctaagtggraatgcatttagagtttcaacattaggatttgcttgtgtctttccatggcctaggtccagcaactaaactttacaaaccagtgttctgcctagagatgaaatgtctctagattctcagtaggttgaaccattgtttattggaatgatctggaatgcagcaatgttaaaactgttgatttagtgtcatctgccaaaactttttgtgccttccctttctgtttttgaaaattacgtgtgtatgcagtacacattaaatgacttcttgagaagtccatctctgtttttgtttttagcttttgccttagatggcttgccacctgtgtaaattgtttatcttttggccagtgttgttatcaatcttggcctaagtgctgacgtgctgttacaccagtgcagaatatctcctttcaaaaagttagttttttttttttttctaagattgggattctacctcctacagctgaagaaattgtgctgttttaaattaggaaagtatgatgactagtaattcacatttctacaaaaagtggtttgtcacacttctttgaacagaaaaagcacagcatgtgttttggtgatgattcttcagttttactgtaaagttcatagtttctttacagcatctgccattttgtatattcatttttgtattgtgtgtcacaggaaaatgtaagacgaaattgggcagggacattatgcttgttcacctctgttttcctagagcccagccttgtgcctggtgtagttggcatcaggtccttgtggcatgaatgagtgaatgaactactatttcaagttcccactgtatggtaactagtcattgtagagcagttcaaagtttgacatttttttgtgctgctctttttttttgagacagaatcttgctctgtcgcccaggctggagtgcaatggtgtgatctcggctcactgcaacctcagcctcccgggttcaagcaattctcctgcctcagcctcctgagtagctgggattacaggtgcctgccaccacgcccagctaatttttgtatttttagtagagayagggtttcaccatgttggtcagggtgatctcaaactcctgacttttcacccgcctcggcttcccaaagtgctgggattacaggcatgagccaatgtgccgggccctgtgctgcttttgacatttaactaggtctctctacaaagacaggcagttcaagtctttggtagtcattgtcccaggtagaactacatcaacaggaaatttgcagcacagttggagctcagcaactccttctggagacaacaccccaccccccaccaccccttatccatctttgtcccatttggtgtattcctgcaagacactccaggaatccttaatcttacccttttaaaaaaggcctctcctgttggcaggaagagcatttagaactacctattttaagtaacttttgtagttgttgggtaaattgaagtgggaagagctgaagagtagagccttgaagtacgtgtctctgctttaacaggctttcatggagagatttgcaataggtttacctccttcccactccaaaagatcaaggggcttggaaaagagtggccataatgcaaacttgtattatgcatctataaaggagagaaaattggacccagcatttcagccaggtcataacacttcttgaaaaaattacgctgagcagatctgtggagaattagactttggtattgtattaagactctaataatggctgggcgtggtggcccgtaatcccaacactttggaaggcccaggcaggaggattgcttgagcccaggagttgaaggccagcctgggcaatatagcgagaccccatctctaccaaaaataaaaaattagtggcatgtgcctgtggccccaactactcgggaggctgagatagaaggatcgcttaagcctgggagtttgaggctgcagtgagccgtgattgttcaactgcactctagtctgggtgacagtgagaccctagccccctaccccaaaaaaagatttgataacactgctcttaccttaaaatgtgtaaatgatgttcactgaaaactttctttagtgactgttaagactataccttcacatttcttgttccaaatactctgtcataaattaaatacaaagctataaattgattttttaaacctcatttgaaatgctgcttttaccagcattttactgttttatgatctatcctttctgtttccctagactattttgttttccacaagttcctttgttcccccaccgcccccccacccyactaacatattaatgtcttttggagtggggagtaaacaaactgaggtggaaaastcatcttagaagaaaarcataacccgctgctcattttttattattttaaatttgcttcagttatgtctctgggtggagtatagaatttttgagaagaatracattcctgccctgaagtgttgacagttgcccgacacaaaggaaagaattaagattgtgaagactgcctaggtgattaaagaaaaagaagccccactctactttttcctcctgccatggcacttcagtgaaaccttggtctcccccgcgcttgttctacctcccgcccttgatctgggatgcagatactaattctccattgtggtacctctctacatttctttttttcttttttttgagacggagtctcgctcttgtcacccaggctggagtgcatgacgtgatctcggctcaccgcaacctccgcctcccagagttcaagtgattctcctgcctcagcctcctgagtagctaggattataaggcacccaacaccatgcccggctaatttttgtatttttagtagaatcggggtttcaccatgttggccaggctggtctcgaactcctgacctcaggtgatccacctgccttggcctcccaaagtgctgggattacaggcatgagccagtgtgcctggccacctctctacatctcttatatgcagagagaaggtgtgacttttttttgtggggtgaggatgggagggtctcatcatgcctaagtatttgctgatgcctgtaaccattcctctagcggcatcatcatgtgaatctaatcacccttttgtaagagcattatttttcagactgcaggtcatgattcagtagtgggttgacatacatttagaagattccaaccaggacttttgtgtgtgtgtgtgtgtgtgtgtgtgtgtgtgtgtgkggcaagacacttaacatgagctctacctccttaacagatttttaagtgcacaaatatagtattgttaactacaggggcaatgttttacagatctctagaactagtttatcttgcataattgaaaccatgctcaccgattagcagttcctcaattttcccctccacctagctcctggcaacaattctgctttctgattctatgagtttgactactttagtacttgatataagtagaattaagcagtatttgtccttctgtgaccgatgtatttcacttaacataatgtcctcaagggtcatctaaattgtcccatactgtaggattttctttttttttttyttttttgaggctgaataatattccattgcttgtatgtaccacattttcttcattcttctgtcagtgaacgtttagttgtctctacatcttggctattgtgaataacttcgatgaacattggagtgctaatatctctttgccaacaggactttttaaaatattaaatggaatagggtgaagaatattaatttatcataccatagtaagaatattatgtaaaacttctgagttatcttctgaggaggtgtgtgaagggtaggcttgtgcattggattgcatgtaaattatttcttactatggttcacagttgaagagtttgaaggccacagtctcagatttatttattcaatgaggtgagcctcgtgaaaaagaacaggttagcactaatctttgcacatagtaggagctcactggtacacattctgaatagaagtgtgaagacaggtcagaagcctagtggctcagatgcaagagagcttgtttgtgtgcagaagccttgagaaataactgagaaacaggctgcgcagataaaagtgtgtgtggtagataaaagtgggtgtggtggatggtgtgccacgtggagatgaagaatggcccgcaggacagaaagtggtgttttggatgtgatatgttgggctttatgggcatcatatcaaaatgctgctttttttgcttactgttgcacttatagagccatggacttggattaaaaaaaagacaaaaatgaacttaaaacgcgccataggtatggttggaaggagaggctgccactttagaaatgctcagctctacttactaggatagtgtttgtctcttcacaccagaaagaaccttggatttggggytcagtttgtgttctcatccaaggctgaagtggattgtcttacagaggtgcgtgtatgctggctttttggaactcaggtattttcctgtgagaagctccaagatcagcctacagatgcctgtttcacctttaatatgacaggtcctaactctagccaccatttactgtgctgcttctgtgggaaacagaagttccaactcttaggttccagggagatacctattttgccccaggatgaggagaggtaagggggatattcctgggtgccctgttgcctgctgagaatacaaacaagtaagcccttctgcacagttcacatgcagcttttcagatatgggttttgtttgtaacttagatatgcacattaaaagacagatctgggaaatctatgatgtaaatgtaacaaatatgacttgattttttctgatgactccagtgttagctgcctgccagaccttttcagctacttagtggcagacatatcatcagcattgaaatctgtctgactccaggtccagtccttaaacattataccaggttttgggttatttacaatcataaatttcattgaatttctttttacagatttcaaactgtataggttgtagagggtcagaaaacaacatttaaaactaaacttttacttctaagtttgtaacccagtgcagtggctcttgaaggcaagaaggtaaattgtcctctagttagcagaaaagtccatgtgaactttgagaggaaaatgcaatgtatctttaatctttatgagcatgttcttatgtgtaaaacagagatgagatttattaagggctgatatatcatccattgagtttgaacttccaatttgcctatgctaggttcagaatgctgaagtgactatttagaaaatgcatagctgggaggccgaggcaggcagatcacaaggtcaggagatcaagaccatcttggctaacatggtgaaaccttgtctctactaaaaatacaaaagaaaaaattagccaggtgtggtggcgagcacctgtagtcccagctactcgggaggctgaggcaggagaatggcgtgaacccgggaggcggatcttgcagtgagcctagatcgcgccactgcactccagcctgggcggcagagcgagactgcatctcaaaaaaaaaaaaaagaaaatgcatagcttgccaggcatggtggcttgtgcctgtaatcccagctacttgggaggctgaggtggaaggatcactggagcccaggagttcatggctgcagtgagctgggatcatgccactactgcactttggcctggatgaccaagtgggaccccatctctttaaaaaaaaaaaaaaaaaaaaaaaaaggaaagaaaaaagaaaatgcctagcttattaatgaataagtgtatgatcctatttaaaaatacagtcttgagtgataaatttagaatggacaaaaacacaattatttgagtcaaattgaaggttctctatagctttgggcaagttgcttactctcccaacttcaattttgtcatctattaaatgaggacaatactaccttccttgcagggttattgagattaaatggggtaatattagtgaggtggtttgcaggtrcctagcctgttaagtaaaatctcacaaatagcctaaaccatttacttagaaaatttaaaacatccagtatatcttatttaaatagctgtggtcrttgaggaatgaaacattccacatatgtagggttttttggkttttttttacagttaactgaaacttgcttgttcagatacaattatattccattaacagtaattttttattgtatttcttttcttttttttaatattatgtatttatktatttatttatttatttatttattttgagacagggtctttcttgctctgtcacccaggctagagtgcagtgacaccatcacagtgtgctgcagccgcagcctcccaggctcaagctgtttagatcgtatttctaagttgcgcttcaaaaacgcattgacacaggctcaggctaggcttcttaaaataagatatagagcacaaattaattatttcttaataggcattacaaagattcaggttccttctataggtcatagcgtattctgtaacacaaaaagcaaagttgtcgcatctctctatcttttttagctgtcactggacattgattcaacagcatttattgtccgttaacccctacccacccccagaagttcccttgtgccctttgcacgtgtgtgcatgcgtgtatgctagagagagagggggagagcacttcarttgattctggttttccttcagacaccacctttgagaaactgccttaaagagtgtgtggtcattaattagatgaaggggagaaaggaaggcattatrgtcaaaagaacagtgtaacaaaggaggaaaggtgagaaataccattggatagtatgtgaaggttattgtgcagtttagtgttgtaaatgcagtgaataggtttagccagcttgtagaagtctttgtctagttctcaaaaagtagaggttatgttgtactttaaaagcatgagaaaagtagaatcgaaaaaaagtgtattagtcttctatacctatctcctacagaaaaaatcttttaagacttatcagttactgtgacctaccatatcatggttgaattcctccatgttaagaccctactgtctagaagtatggtrttagcagatgtactcattgattggtactgtctgtagtttcattttgaagcataaacctgagtaacattcagtaagactctgtatgttcagaaaagatgtcacaatattaattgagcctctaacatcactatttatgtttctgaacatttttacatactgtcaaggcatctgaatatattcttaaagttagaaaactgtatatgaagcattactgatattgctggtattactggaaagaccatatcctaacgagcttgctaattagtactctgtttctacatttcatgatataatcaggtgtttttaaaaaaacattttaacagctttattgagttataattaacataaagttaactgcacatatttaaaatgtacaatttggtaagttttgatatatgtatacatcataaaatcacctctgataataagtatattcattatctccaaaaatgtcatcatgcccctttggtaatttcttcctctsgccatcccatgcagctgatttgctttctgtagtttgcattttctagattttcatatttaagaaatcatagtttgcatttgatatctagtttcatatacctaggaaatcatccagcatatcctcttttggtctgccttcttagagtctacataaatattttgagatccatccatgttgttacatgtgtcagtagttcattccttttcgtcgctgagtaatatttcattccatggttataccagtttgtttatacattcaccatttgtgttgcattcagtttttcactattataaaaaaattatatgaacattaacatacaagtttgtatgtatggactaatgcttttcttcatcttattaccctaggagtagcgtgttgttaactttttaaggaaactataataccaaacttttccagggtggttataccattttgcattctcactagcagagtatgccagttcagttcatccacattcttgttaacaccggtatgggcagtctctttaattttagctactctaataggagtgtggtggtacgttgttgtatttttaaattgcattttcctgaagatcagtgatgttgagtatctttttatgtgccgatttgtcatgtgtgtatcttttttgtgaagtgtgttaaaatcatttgtctgttctaaaactattgagttttgagcgttctctatattttggatgtaagtattatcagacacatgctttgcaaactttgcaaatatttcctctcagtctgttttcattctctttttttattttttatttttttttgagacagagttctcactctatggcccaggctgtagtgcagcggtgcaatctcagctaagtgcaacctccaccttccaggttcaagtgattctcctgcttcagcctcccaagtagctgggatcacaggcatgcgccaccacgcctggctaattttgtgtttttagtagaggtgaggtttcgccatgttggccaggctggtcttgaactcctgagctcaggcagtccgcctgccttggcctcccagagtgctaggattacagtcttaagccactgtgcttggccttatttttatttttaagagatgaggttctgctatgctgcctaggctgtcctagaactcttgggctcaaacaaacctctgccccagcctaacaagtagctgggacttacaggcatgtgccacctcacctggctaatggcatactcttttgattgctgaatctttataataagccatgagatcatgtagtattagctctctagctttattctttttcaactggtttgactcttctggatattttgaatttccacgtgaattttagaaccagattggcaatttctacttaaaacaaaaaaaccctgctggggttttttattgggattgcattgaatctgtagatcagtttgggaaaaattaacatctcaacaatattgagtcttcaagtatatgaatatctctccactctacttacatctttcatttctcccagcagtgttttgtagtttttcgtgtataggtctttcacatcttttttgtcatgttatccctgaatgtttctcatgtttcagttctattgtaaatggtttccccggaccttcagctccatctcttccacccagggagtccactgggctcttcttcaccttcctgcccatgacctggagcctctccccaggcagtaagtgggggcaattgtagggcccactgattttcccccgtttctcagggatcctttcttatctgatacgcagtgtcttgaaaattattctttcatatattttctcttcctctctcttttttttttttgttttttggtttttcaggtaggagggtaaatttagcccctgttactccatcttgattagaagtggaagtgtttcccactttttctatccttttagctgtgttctcctttgtctgtaaactttgtccaaagctggctatcattgtggtttataagatacttgccagcacccaagatttagccaagtttttaaaaggtcaggattttctttgctcttaagccatagttttcatcatttagtatctctgttatcatcctgtgactggatatttggtaaaaacacaattagtttcaaagtcgacatacattttattaatgagctttagtctgaagatcagagtcgaagacctggggtcaccccgggttgtgtgagcttagaaaacagaactaaagactgggcgtgatggttcacgcctgtaatcccggcactttgggaggccgaggcaggtggatcacttgaggtcaggagttcaagaccagcctgaccaacatggtgaaamccccctctctaataaaaatacaaaattagctgagagttgtggcacatgcctgtaatcccagctaccagggaggctggggcaggagaatcacttgaacctgagaggcagaggttgcagtgacctgagattgcgccattgcactccagcctgggcgacaagagtgaaactccgtctcaaaaaaaaaaaaaagaaaagaaaaacagaacttaaattctttggaccacartttcctcatttgtaagactaattaaaaaaccctatcatttggtgttttgaattgcatgtttatatatatagattcttttagttgtattttttaacaatttttaattgtttcagaataccttaatacttaatactctgtaacttatgaaaatcggtaaattctaccagaagtggtagaattcattccccctgcaacctttcaggtttcagcattttctttgagattacatactttaccatcaactgaaaaagtaatcttaattaatttcctagaaatttgatgtgggagttagtagtattgctgtgtgtaggaagaatgatggcaggctttcaagaggtggggaaggacaagaagcctctggatttgccagttgggcaggtactgggggcgtctggcaacaacatatctgaacatattaaggatttgggagaatagcaaaagttggtgtcagatcaaaataaatgccacaaagcccccatgcatgtttttacatttcatatgatgtttgaaatcttgatgatagtttttagaaggagacaggcctgcactgggacagcatatgagtttgggtcactttggtaatatctstgtggctaagttatcactggtgtgtagtgaaactgaatgagtgatgacttaatctccacttaatggttctgtttctcagacatggtttaaaaagacagagaaggatgtaatgagcctcagacttatagccaaaagagttcatatttgatatatctttattggcacttggaaagtttggttatttagattggtatgttctgagcgagtttctatgactaaggttctactctgatggatgatctctaaagagctttctgtattagatttttgtgtctgttttatggttagagtttagtagttgaacttatttccacacaatactacgaaagagcccccaaaacagatgttcctagttacataaatgctcttacagaccccctgttgtctttgtccccctcccccaagattctgtttttaggcctttggattcagttaactcgtttttgaagtggatggtgacttagcagaattcagactctaaggtgagtgactccatgacgcttttccaggaaactagtaaaaatctgggttgtaagtctgccccattcagattaactgctggaggggaaccagagcttcacagagatagaaaaggtcatagaagctgctgttttccagcagacttttcagcagtcctgcctgagctaagcagggtagtaccctggcctgccagtgtgttaagttgtgtctaggggttatgatctgttggctccactactcaaatagagcaagaactgggaagtaaacaaaaactttatycctggaagcatatttgaggcctatacgcagatcgctttatacatagttcctgcagactcggtcatttagtatctcagctcaggatgtactgcaagaaattgaggcagaaatgagagggcgcagtcgagagaggagctgcccaaagcaggtccagatgtggccttctgatatgcccacaagggccctgccctgttatagctgtagttaaagaagtgaaattgccaaaaacatctgaagccctaataaaaagtgaaagtatgtgtagtatcttcctattgatagcagatagtcaattttagaaagatttccactmaygtatatgtaaactttttaaagaaaacatatgctctaaaggggtaagttttgggtaataagaaaattaatttcaataaaatgaatgttctgtgtttgatgagtgaaagaaaaatgatggtcttrtactaagagtttctggaagactttaatttcaaaaacagtagtttagaactggaagggacattgggttttctcytattttcagatgatttaaaagccaaagactacaacacattctaagtggctatcattagggaaaattaaggctgctctgggcaggataaataccttgtacaactttaggaggcaccagggtgggtagcaccccttgagggtggaaaggggaaggagttacagtgttgggggttcagcaaaggtctctgaaggagtggcacttgacttgaagcacacaagagccagctcttgaaatactgaggtaaaaatcttccaggcagagggaacaaaagtgtcttaaaggccttgaagtgattgttgtagagacagaaaaggccagtgtagctgcaacatcgtgtggggtgggttgaaatgaaggaggctgagaagattggtcctaatgctctttaggagggatgttggagtttctgctgagtgtgagccatttaagagtttcaaggagagtgacttgacctgcttgctgaaggaccatggtcttcctgactgtagggttagacagcattccatgccagtagctttcacctttgactaaaacaagygctctgtgaaacaacatttccacgaaacagcagttcccttcccatgagtgacatattctgatatttctattctaccctattaacgattattttttgttatgttgatcacaactcatcatggcccacaaaggagctgtaaccaatgtttgagaaacacaagacactattctgtgtcaatcagtgtatcactgccctggagctagaaaatagtaaccactaacccctgagtggtacagtgtacttaatactgttttagcactttacatgcattgttttatgtaatcctccccagcagccctgtgaggcaagtattacctccattctgcaaaaactgaagcatcgagaagttaccaagattcaaactgattgactccaaagcctgcactcttagctgctcccccacctattaccgcccaaataggcaggaggaaaagagctctgtgacagttttaataggctccaaacagagatgagattgagggtggcgaggaagagaagaaagaatagagaaagggatggtggtaatgcaggaagtaggctttttgttttttaatgaaaatatgaatatgtcatcagccacagatccacgcttaagcattttttggtaccccatagcaggtaattctcttctagtgaaatgccagcactctttcaaaacgacaccattgaatatgcttggtaaaattctcggtctgcaggacaaatgctaacaagtttagtaatgtgactgcagccttcccagctaatctgctggcaagcgagccctgtgaaaaggcagatgcaggacgagccctttctrtgaaaatcaggctgacctcatttgatagttatgcagcctgtgtcgatctcttcccagggcagcaggtagcaggccagaatcagaaccccaagtcaggagctttaacttatctgagattttcatcctttagcatgaatttcaaatatggcagggaaggagattgaattcacaaaaacctaaatcttccaaatcccacaggttacagttactctgttggtgggatccactataacacccaggtacgattcctgaatgggaacctgatgctgcctttgtgagatgtggttatgacacagtgtctgyactcagattcgtatgatggtggaatggcattaaacttggaggtcttgaagccctgtcgtcctgtccctggaggcataggtgacccccagtgagcactagcagtcactttggacttagaattcctgtatttagcattgactctcacttagtctctttagaaaactctcttttttctctctgttaggttgattagtctaacttcagttcctaggaactaaaatcctgaatttctcatrggcagtctgaatttagggcagcctaatttataacatgccttagaaggaaatcatgtgtgcattcttgcttgctcagcccaagaagtgtatcaggccctgagcggggcaccgcccactgggggatgtgttctctgtcttgtccccatgctaaagccctaaactctcctgcacctagagggaaccgctgcagaaattctccatgattctcacccactacagtgccccagctctggctactgcagggcagttgatccaaagcagcttctgtctggggatcaggatactgtttcttgtcaaccacgtggtgactagaactctagcaggggaatacgttcttaggaaaaagccaaggaattcatttgtctttagaactcagaacctattgtactgaagtacagatgattggaggtaaataaggactattcatacttacaatgttgtttctttaagagaaaatgtgttctggtttaggtttctaaattacagagtacctgagtaatgctggtggccataagcagacatccccattggcaacttgatgtgctgtcttttctgaggttaatttgtgtgagatgactggttaggttttgctagatttggttcagaaataaagtaggaatgccttaatggtctttataattatcagaaaattaaaactaacatatgcctgaattgtggtagcatgatgtttttaaaaaaatcaaccaatgtaaattcagaggcccagaaaatgtctcatgcatccgtggagcatgaaagagcaggtctacattcaaggatttcctttgtgccaacaataatgaattagtgtgtccaggtcaaattaattttaggattgtgttttctcttgggttttggtccagtgctgtctagtacaacctctgcagtaagagaaatgttctactctatactatccattagggagtaggaaactgatttttttattttatgttaagtaattttaaatccacacagccacatgtgcttagtgactagcataatggacaacacaattttttgtgttcctttggtgacaggtgacattttctccctgtatgagagtcctcccagtttaccccgcaactctcactgtctttctctattttattaaagtcttgaaatttttctcttgggactcatatcactaatctaggcaagttaagaatgttttctctgtttgggctgagacaatattgagaaagttactccacctaatcctataggaaattaattgatttttgtgcagtattaaaattgagattaatgtgttataaataaaaagcagcctgctctgtgctacagaaaactagatcagggagaggccacatttattttaatttctaaaagtgtaaacctttcatagtatcatgtgaaattctttagtatgaatagacatttcaaagtaggaggaaaaaaacctattttctcaaaatatatgaaatgttagcagaatttgatacagctttagacaaaactgctaaaacattttctttttggaacatagaacaatttaattattacagtatccacagtcatcaaatatatatatatttaaatcatcaaatatatatgtttaaaatatagttgtgtgtgtgatgttatgtatgtataatgtcatgtacacraaagcacatacagtttctactttgtacttactggtcccctaaaagtgcttggagattaccatgtcaaacagtggttttcctatttgtgatgtcatcattagacatatctaacatgggagtccatctttaaaaatctgagccatatgtaattttattacatctgtattagaatctcatattcagttttctactttttaaaacacagctcctcttttagtcttgtcagtcaggttgtcctatgttactgtgggtgtttaaaaattaagtagcatcactatggctaacacctctttgggtgctccaagtttgggaagtgaatgccatccaacttgatggttgagatttcttttaaaaaaaaatttgtcattaccattttgctgtgagaggaaacagtcttctgggcagaaggcattgagtccctaactttaaaacagtttataacctagagggtgactacttggcatgatctctgtggggtggatgcagtgatctgcgtctttgacaggcgagagggtgattgtgctgcagtcagtggtgcagctcccctgggggacgggatcctatgggaggttgaattttatgttgaaggatccctagaccctcacctttgcctagccagtccccatgtaaggaatcaacttaaatttaaatggcacttcctctgggaagccttctgatcttctagaccggcttagactgtgctgttacatatgcacagctctctytggtcattttgagcactcgttcagataattcagcaatagcgtgttattggctgtcagtccagccagtgtaagcctgagaacaggagccacatctgcctggctcttcacagtattcccagcacctgcttagcaaagagctttgttgaatggatgaaaggacaaaggggttagtgctgggggtggggggcagggagygtgtccagcaagacagtgttttttggcactgagtagtcatcaactctaactagagccttagtcctcaaaatggttgcaggcttgtttaggagttagtgtaaggagaaaactaagtctctgagaagcaacagttggttctagcaaaaggatcaaaactattgtttgggccaktgcaagagagccagcagtgtggaatggaggagctggccctgaaccccagatgtcagtaggggtctgaagaccctgccctgcacgcatactctacctggactaggtcctggggagcccttcactgtcttgccctccttggcctgaccacctggatagagatccttcccagggtgtaaggaggggaaagtcctcatgctgtctctgggaggaatgtaggacctcacagctcatagtccctgaagggcttggtgtaggtttcttctcttcagaggtcaagcatatgatgggttaaatagtttgagagggaaaattccttccttctcatttacagagaaactgacaaaagaactttctccctaaatggggaactgcctgtaactgctctgagtattatagaactgtattgtttcctaattaagcattgtttttacctctaggagtagatattaagaaattagtatttcataaaatacccagccattcctcaaattgtttttttktttttttttttgaggcggagtcttgctctgtcacccaggccagagtgcagtgccgcgatctcggctcactgcaagctctgcctcctgagttcacgccattctcctgcctcagcctccttagtagctgggactacaggcgcccgccagcatgcctagctaattttttgtatttttagtagagatggggcttcaccgtgttagccaggatggtcttgatctcctgaccttgtgatccgcccgcctcggcctcccaaagtgctgggattacaggcatgagccaccgtgccctgcctgccattcctcaaattctaagctccctgaaactcttacccttaaggtagagtatcaaaagtttttaaaagcaagaaaagaaaatttttatcttatgctagtggtaaatgccatttaaagacttaaatcctaaaagcttgtatttacccttaaacttcattgtcacaggtatttctctgtctgctgtatattcagcattgtactgagtacttacatcgcctcagttaaaattctttgtttttgttggcctaatttcagattaacataaaagtacctcacccttgtttaaacctgcattaaatgacttggattactgtgtctggagttttcctagcaacactatttcacacacaaagcaaagtacatactagccttttgtatgtgtctttgtccttggttcaacagctcagggatagtagtgtattaatgacttttattctggtcttttatatgtgtctttgtccttgatttgacagctgagaatagtggtttttattctagtaggataaaatttagccttttagcactagaagtctaagagattttaattttcatttgtaaaaatagtgcacatttaaaatctgaatgtcttgcaragtggtcaggyatttttttattgggtctcttctccctcaattaaaaggataactgatgggtgccaaaaaacagtatcccagagtcaccttcagggcattgtgacctgtgtattgcagagaatagaggtcggtgggtatttttttcccctacttccaagatgatatgttaattgcacaagtttaaattggtcactctgcaacccatttataatgctctttgggtatgtatgcttttggagttgtatatatgtgtaaagtacataaatatatttgatgttgctgcaattctgggtttacagcctagatgctattcaaagttagtaagctgatacagttttatccttggaatcagtgttgtgatacagaaaggcatctgttttattattttcttttgtatgttgttcctcttatcctttggattcaaaaatgaagtttagaatggggatacaatccagaaatcataaaataatttattggggctttagatgttttatattggaaaatcgttgtcttaatgtatcactttttattatcaccaatcatctcggttattgcgtcaaaccccatttcagctctagtttgacttttaaatawgcagttacgattcagaatgctcatatagacaggctctaatcrgaaataaacataaatgtgttgaggtggtgggggtgtttaacaaaaagctaaaagtttgaagaacctctttgaggactagtgcagaaagwtcaaggtgactgcagagaaggagcacttcagaaggcattamattttagtttgaaaaaccgtcaggaaattcttgaggcttccaactgatgattattctattgaaaagtaaatttggttttctttctcatttggtaaatattctgatgtttttctgtttcatttgcttaatgagatcatgaagtgattatactttaattgaggagagtttggtttgttaacattttaaatgtcatccrtttggcatttaaaactgatatttaaaactcagaatgagctttaactttttgttcttttgccctacccatgttttaaacttgtgggctaagagtgaatttgaaaactaaggatttcaatttttttcaaagttaggaaactaacaattaaagttattgcaacttagtttatataattgctacaagttcttgctcatttggtaaaaaataaatgatgcactcagtaagcaaggaagtatctcttagactttctttaggaagcatgttttctagttaagcaaataacttaattccagtagcagatgccaggcagatgagttggagtctaagtgagtgaaggaggaagtactgaagaaggaacatttcctcctagctgggagagttaggaatgctacacagagtaagtgggttccgtcctgggcctgagggatgggccagttcatctgttaaaatctatgactgtaactattgttacagcccagcttccatgatataatgttaggaccccttccatgaaatgaaagcataatcaatttgagatagtttcatccagtattataacttttccctgcttcatataggttataacaattttataaaaagcttatcttcacttaccaagattggcaccctctacagccctagcagcaaggtgtgctgggccttgaggccagacggggctggcttcaaatctctgcctgacacttgtggccttgagtagcttacctctctgagcccctttgcccacctgtgaaatgggtaatcaagcctgcttttgcatgctgggtttgaagattaggattcatatatgaaagcatatcctttctcattatgcttatttaaagattaacttgtatcttttcacatacccattctgagactcaaccaagttttctgtttccaggttttagctgttccggagtcacagatctatagatggtatcttgcaacctgtaattgttgttgcgaacagttccagattctgcagcctagtttttagtcagctgacactgagtgattctgcaggtggagatctcatgtttctggttcgtgtacccaaatcaagcagacttttccatttcttgagctaaaagattctgatgagagctaataaacgttaactgaaagtttattttgttgttgtttaaatctgctaggctatctcctacagttactaacatttttttcctctttataatcatattacttagcccttaatgtttctgtgatgaggayggctgactcaaatgccttccaagaccagggaaatacacataaataagggaataaactgcagacagtgtgcacccctgaaaagcaaacagcccagtcacacagtcacaggcttcgtgctgggcttctgggtattgttttaagactgagaacctagatttacatgtgaaatatctgggaaatagtggatatacggttgcctgcctttttattttttctaaactactattgtaggccaaaccaaatacactgtagcctggtttgccttgtgaggaatcagtttcctacctctgtagtaattgtattggtgccatgtgcaaagggtactttcaagggcttgcctgaataattctgtatcttttcacttatatatggataatggatgttttgtttccatcacacacagtgattcataatcttcactgctcacgccaactgtcatgattgaaagcttgtaacttcaggaaaaacaaaagtaggttctagttgtattctgcccagaagtctgactttgtgtttatgtcctttatttttactagaattccacgaggtattgttaataaatgtactagtgcaccctgcattgcaaattttatatggtttcagagtggagaagttgccttaaattacttgagataaaccaaaattaaattgttgaaacccctcaaataacttctccacacggtatatttatgattatgatttaactctccaaaagtgggactggtagtgggattatgaaagtgtaatctaccttacttattactctgccagtaagtaagtgtaatctaccttgactggaatgtccagataacctctttcttaaacttatagtaagccaactgaggaaataaattttaaaatgcagcttcttttttacaacagcaatttacagaatctttgcttcaaaacacatcttttttttgaagtacagcttgtcaaaatgggtatcgacctttccataggatattaagtaggacagaggaaagaagggatggaagtggcactactgactgatcctttctacaggtttccatattatgcatatgaacacttatgtgctgtactgtaaacaaatgtgactgtctggagttactgtggatcctttacagacttcacgtttccctgcctttttcttctggaggccacactgaaaacaagtctggaagaatgttaatttttctcacctttattttcaataggtggaatacatgtyggtatcttttgatcatgaaaataaaaaagtccggttggtcctgtctggggagaaagttcttgaaactctkcaagagaagggggaaaggacaaacccaaagtaagctctcatgtgctgatttagtgtttctgaaactgctaaaacttctagaatatagagttttttctcaattattggaggcaggatagcctaacagttaagagtacaggctctggtttcaggttgccatagtttcaaatcatggttcctttackcaatagctgaataaccttgggcaagttacttaacttttctgtgcctcagttctctcatctgtaaagtaaagatcatagcaatacctacctaaggtgttggaattaaatacattaatatatgaagcactttgtacagtaaactaaatataaagcctgttttttattaaaacatttttgggaaaaaatgtattgcagaagcgtataactgggatcacaaaccatgatgcaagatataagttgcagatgggctttgtttggctttgtttggctggcatgatttttttttgagacggagtctcactctgtcgtccgggctggagtgcagtggcacgatctcagctcactgcaagctccacctcctggcttcacgccattctcctgcctcaccctcccgagtagctgggactacaggcgcccgccaccacgcctggctaattttttgtatttttagtagagacgggggtttcaccrtgttagccaggatggtctccatttcctgacctcatgatctgcccgcctcagcctcccaaagtgctgggattacaagcatgagccaccgcacccggcctggtgtgtttttaaggtattcctacatttaagtagacagagacggggaggggaggggaatatatactcctctgctcattttccactcattcgttttggggaagctgcatttgagtttggagggcagcactgaattgaaagaacccttaaggcctcatctccttctctgcagagtaggttagtttgtcctggacagtgagtgctctgtgtgcattttcagttacttataaagattttgggttgggcatggtggctcatgcctgtaatcccagcactttgggaggccgaggcaggcagatcacttaaggccaggagttcaagaccagcctggctaacacggtgaaaccccatctctactaaaaatacaaaaattagccaggtgtggtagggcacacctgtgatcccagctacacaggaggctgaggcacaagaatcacttggacctgggaggcagaggttgcagtaagccaagatcgtgccattgcactccagcctgggtgacagagcgagactctgtctcaaaagaaaaaaaacattttggacccaatacttgttgacccttatgtagttgaatagctatggaaaagtaataatcactgagaactgtgaaggacttcttagcttcatttatacctaatggtttctacacttttaaagcaactttaaaaacttaaaaattgagcagactatagcaaaagaataagatggaactaagttatttctcctccgtagccatcctaccctttggagaccagagtatgggagttacatgattgaagggacaccaggacagccctacggaggaacaatgtccgagttcaatacagttgaggccaacatgcgaaaacgccggaaggaggctacttctatattagaagaaaatcaggctctttgcacaataacttcatttcccaggttagttcctatattaacatgccccagcagatctctcagagatacaggtaatgaaaagagcaagtcacgacccgggcattccaccttacaatcctcatacrttacagatggtttatcttttatagactgcacttgatagactctgtaacagtagagctgcagacacagttgcatgccagcttctgtcagctgtggtggctgcaccgtggtgagtgcactcagtgggggctcartgggaaagaccaggatactgtgatgacagaccagcagtgtggccgtgtctgccgcaggcgagggtggagggagcagcacgcctgccacacagttctgaccctgtaagcagtagccaaagcttctggaatgctgtcccctggtgactgtgacagttgcgccctcatgcactttcaaaaagcagcatttacctgctagcatatggtggcatcagtggcagatcagaggatctgcagtgctcccaaagcactatcgataccgatgctctatgaacaacgtgagtcattaggtccttgcatattgttctgaaaagaagatttagggtttgtcatcaaatctagttatgaccaaaagtacataaaagtaaatagtgaaattatgttcttcgcttagaatgaggtacatgaatatcatatgtattatacatagaacctctatgtaaaaatacatttctgccaaaacatgaatgtgatttatctatgctagatgtctgtcagatggtgacagtatacttagctcctcaaagttcaaaggagctctgggggttggtatcaatggtggagaacactttgaactatttttataccttttctctgatacgtgtccgtcagccattcagggtcatatcattggcctcagaggggcatttaaatgggaattctatttttttttttatatctctactgtaacatctaaatagttgaaaacttatttaagccagccatctaacatttatagaagcatctctatttctgtgataccttcattctgtatgtacaggtcacttctctctccacccccagaaggaaaaacccagctgggtgagggtggacagatttgttttgattagagtgggcacatttcttcgacctaatgtttgaaagaggaggtgaaaaatcattggccctgccattcactcagacacttgagtgcctgctgcaggcagaatgggcatgctctcatgagtgaagacggacagctctgtctctgtggagctggggggttgaagaacaatcaaatacccatagattcataagcgtcaaagtggggctgtgctagcaggaggagatggggagcaaagagtacaacctaggtatccagtggactctggtgggtggagggggagggggtgggatgtccaaggttccaggaggagtgaaataggaatgrggagcggaggacagtcttagggagggggagcagtgtgtgtagaagtcctaggatgaaccaaacaagcggggacttcctgggaactagaagaaagcaagctggccagtgtgactaggaggctgaggaggaagtgcaggtatggggkaaagggaagctggcaggtaattggcaggccaggtcaggttaaccataaattttagttgttctcctaaaagcagttgaaggccttggaaaggttgggttgggcagatggcatyccctttttgctttgcagccctcacttgggctgtagtgtgagagtagctgtggagctggtgccagggcttactaggaggtgagtgagggagctccctgaggggagacaagggctgcctggatgccmgtgggtgctggtgataggaaaagtgggtggtttaaaagatgacagagtcagtgaactgctggggagagaagacacatcaaggcttttgctataggtcattgtcctgaaaaccttaagagtactagagtagaggccaaggagtaggttacagatgttaaatgacaacttctagtgaactggaaaatttaataccttatatgttcatttttttccccttaacattaagagggttgtacatttcacttagcaaattaagaaagtgggaggggatttgtaacacaaaccagaactgttttatatattaaagctgaagaatatataggattgatgggcagtggtgtttccttctgggccagaaaataaagttttgggttaagcctaatgtgccctttaccttgagaatggttccatatgggatagttgcctttttaaaaaagatttagtgtctgggcatggtgtcttacacctgtaatcccagcactttgggaggccgaggcaggcggatcacctgaagtcaggagttcgagaccagcctggccaacatggtgaaaccccgtctttacaaaaaatacaaaaattagccaggtatggtggcatgcgcctgtaatcccagctactccggaggctgaggcaggagaaccgcttgaacctgggaggtggaggttgcagtgagctgagattgtgccgctctgctccagcctgggtgacaaagcaagcctccgtctcaaaataaataaataaataaaaataaaaagattcagcatcttaagtcattgtgaagggaaagttgagacagaggaataagctttattctaaaaacctgtaatttagaaaaaattatatgtataattttttataccctgtccatataggaaggtattttgggacttgaaacaataattattagttatttagtggttagaagcctccctatacatccacaataaatgataaagttttgttgtagtataggatcaagagagaaaggagtgctctggttcttaagtgtaaacagggtgactttataaagatgcaaagatttatagtgtggaactctagtccaaaacagtaatcatgtgactatttaaaattaaaattatataaaatgaaaattgtagttcctgatgtgactgaggaactagcctcatttcaagggctcagtagccacgtggttagtgactaccacatcggtttggatagtggagatattaaacatttccatcactccagaaagttctgtgggacagcactgctctagaatgaarcagtgccgtaggtgtccgaagatgcaagttctgattctaccttctcccttccacacaaacacattctcattctctcttcatccaatctgattctggtgagcaaggaatcccctcagatttaagtttattactctcccaaaggactattcctaaggttstaggctcatagtaaataaygcacatagcttcaagaattytcaagaacccttgtagctgggaactgttttytagataagatcactaccttcaattgtttacaaggtggatwtgggcaggcaacagatactttattttatattaagaaaaggtaggggttaaaaataaggcattgatggccaggtgaggtggcacgtgcttgtaatcccagtactttaggaggctgaggcagaaggattactggagcctaggagttaaagaccattytgggtagcatagtgagacctcgtccctggaaaaaaaaaaaaaaaaaaaaaaaaaaaaacttggtacagtgactcatgcctgtaatcccagctaytcaggagcctgaggcaggaggatgacttgagcccaggagttcaaggctgcactgagctatgattgcaccactgcactccagcctgggagacagagcaagaccctttctcagaaaaaaaaaaaaaaaaaaaaaawtttttttttaaaagatatgagctagtcttgatcctcaagccaaaagtttcttcccactaatttaaaactcctcccttgtttggctttcgcttagtctttgtcctccctcacagcacatgtaatattgacctcaaattcctaacttggaaaaactggggccatcactaaaagtgatgtagaatttgagctttacacttargaataaatatggagcttcatttttctgtgttgaaattagagctccttaagtcaagtaagagaataggattgggtttcagacttcagagggtgatctcaggggtagatggggacacctgcagagacactccctaatcttgagggactcatgaggtgacctatagaggcaaaaaacaggctccttccagattcagagcctaccaggaagtgggaggcagtggtgccatgcagcaggtccaaagataatctgagagtttagagatggaaaaggaagacacctcatargccatgtaggggacacctgtcacccatgacagctgatgtgaccaagggaaatgacttctgtgctatcagtccttcctattagatgaagagatggagaggacccgagtaagtgctgtgtggtttgtgagtgagtggagacttggataaagttagtagtgggctggaattaaaagaagatccttgtgagcaagaagtgtggggagtggttgtaaaggggcacagtatttacacaacatctgttttgtaaacacaaagccctctgaaaaggggatactagaaatgaggtgtctttggcaggtgcagtgatggcaagactgcacacaattaattcttgaaaacaaatcccatctatttagttcttcaatttgttgtagattaggctgtcctgggttcacactgcccgaggtcaaacccaacccagtggaaggaggagcttccaagtccctcttctttccrgatgaagcaataaacaagcaccctcgcttcaggtgagtatggctttgtgttgaaatgcagatgcccttcactagacccctgacttctgagagtatagtatttctgtctagaaatcctttttgagcattaactgagttttggctctcttcctaagtaaccagagaagatagcagatgtgcacctgttcacatcttcagtacccccaggcttcttggttgttgatgcrtgcaccaggcttgatttgtcaattctccaagtcgtcacaaagttattcgctgagccactgcgaataactcttttaatagggagattattttcagtcctaggtctgtaaatgcctactgggattttttttttctcttagttatttctccttttttgtcctctctaaccatcagtatctgtgatttgcccatcttactctatataacttataaaataggtgcagtacctgatatatataataggcactctcttccattaacttcaagttctgttggtttgttgttcaattctgaggttttaagttgctttaaggctctcactagyctgatcttagctttgtacaatgcatgctcatctgtcatcctgagcctaggctcctgatccagagtgggaacatggagacttctcagcgttcattcctttaacaggccctcacgtttgctaygtgcagagccttttggggaagacagatatttgtagacgtagtttctaacttcatatgttgtcatgtgtttaaaggaaaataaaaataattcagctgctcaagaagagatagattatgacagatgtcaaaagatgcaccagaaatccttcttggagaaagtaaggtgcttctgactgagggaatcaaagcaggcttcacggaagaggtggcatttaagctgagtctatagcagcactgcccatagaaacatgtaattgtaaatgttctcatagccacattaaagtaaaaaccagatgaacataattttatattttgtttaacccaaaacgtccaaaaatgttatcatttgatccatgtaatcctttactcacaagtaattttacattttttttgtacggagtcttcaaaatctggtgtatattttactctcacagcatgtgcatgttttcattaggacaagccatatttcaagtactcagtggccactgtgtgcctggtagcttctggactaaacaagcatgagtctggaggataattattaatcctgcagagatgagggagggaggagcaaggtattggggctccagagatgcctgggcaaagtgggtactaaagtttgaccaaagtctttggagttaatttgggacatgttgcaaacagtgaaagcagaccatggcagactttgaacacctgaattgatttggtaagttacagggagccttgggagcaggggttgagcaggagacagaacggcattctcgagcaggagccaaagaattgatactaatgcaaaatctttaatcacaaagttcccttgtagtgtcttgacaccacagatacattttctgttgagttgtcttaganaactaatttgaggtatgatttcattccacttacttgtatgtaatcaaattcttcttttacacratgactcttaggtgaccaatttatgacgtttggttgtctgttttagtaccttaacaagaaatatccgacataggagaggagaaaaggttgtcatcaatgtaccaagtaagtctactgagaggtggtggggtgggagagagacatgwtgtattgttgtttaatcctggattctaaaccattyttatttttgtatttttataatacagtatttaaggacaagaatacaccatctccatttatagaaacatttactgaggatgatgaagcttcaagggcttctaagccggatcatatttacatggatgccatgggatttggaatgggcaattgctgtctccaggtatagtttcaaatatacagagaggcaaagtgttccatccatttctgttttttaacttctttatatatgcatgtttcctgttccaaaaatcacattttaatgaggttgaaatggtagctggtatgcctttctgaaaaacatgaagttatattagtaaattcattggaagctgtctatgactaatagttctacagactctgttgttcaccacaaaggtatatacggtatatatacctttataactgtaatttcagttaacttaaaatgcaatatattctgtcattgtttcccttctctttttatatgcctagtttttactgccatctcgtgacaggctagtgaggtggtttaaatattgttcaaaactctgaaaatgagctctgatggaagtattccaatgattttgtgatccaagggatttgtgcaaagctgtctagcggtacaaaaagaataaatatttagcagcttgtgtttgtcttgcccctgagtaaagtatacaggagcctgtctctgtttacccatttaaaaattttcctggatctgtttaaatgatggtgcccctggcagtgagtgtgtccaagctcacttaggaccagagtggaagagcatggaacccatcaggtggccacacamaagcctgcagttggcttttggctctgtcactactcaggtttttgggcaactccctttacttcttttggctcagatttttcatcagttgaaagaagggctgatattaagtccccttctaggtctgactctaagctaatatttattttattgccttaactaacagaagtaaaagagagaggctgcttgttatttaatgtccaaggaaattttatccagttgtgattacttcagctgattcaaaacagcgtcyttagaggcacagggccgtgcagagcctggacccatgtaagayccctctgwgccgccagcctgactgctctcagtgcaaagacccagaacccagccttccttcacctgaaacagctgcagcgtgcacacacacttcttgtgcatatatctctggtctatttattttcaaaactaagtataatccaaattgaatgctggaatcagatttttccattctgaatgtgtttaaataacatggccaaggataatttctttctgttttcttgacatttataggtagtataaratatgtgacttccaaataaacataaaccatcacacttcacgaaaaaagagatctttcgacttttaactgcctgtttcctatcttaattacaagtatttctaaagaaaaccattaagttctagagcttacagtacatggttttaaaattgtataagtgctgttaagagtattgattgccttttcttggtttaatattaaaccagggtgttctgccraagaccgcatagtttctctgatatggttccaaagggatattctttccactgaaacactgtatgtatacyagtaaatgcttcctaatggtagatgataaatatttttgttgcttgtagatagaatttttccatctagtgtaagcttaggattgttttctttttcccagtgacatgtacagtttcactactccacttaaaaaaaatcgttagctcagataaagtgtgtggcacatgaaatgaattttgccaattcaccaccgaaatccctgctttatatctcttcagtggaacactaaaccaacttctttcccaagtacactgatttgatctttacaaattatatgaatgtattaaattatcacatgtgccctgaaactgtgtacatctattatgtatcattagagagatggaaaaaaaaaaaagaaactgcttagtaaagtagaaaaaatagttttaaagtaattttgtaaggctaatggaagacttactgtataaarcaaaaaggattttaaccacattcaaattaktgactgttttggggcttttcaggaatcacttaaaaagcaccaagttcacagccaggcacggtggctcatgcctgtaatcccagcactttgggaggctgagrtgggcagatcacttgaggtcaggagtttgagacaagcctggtcatcatggcaaaatctcatctctactaaaaatacaaaaattagmcctggtggcatgtgcctgtaatcccagctactgaggagtctgaggcatgagaaacgcttgaacctgggaggcggaggttgcagtgagccaagatcgtgccactgcattccagcctggggaacagagcaagtctttgtctcaaaaaaaaaaaaaaaaaaagcactaagttcatgacaggttatggtagcccctcccacccccccccccaaagtcatgtgacttcaaatctgggttgtagataaagtttagattagatktttcagtttctaacatatatgttccttagttcctccctccacccccaaccccacccccatcagtttcctagcaacattgtgtgtctccttcatatgrtgcctcaaaacgacactagaagcccaaattagtcatgtattcatagctttttaaggtataagaactttttttccttccattaaagccattatccacagtgatgtcctatttaatttgattgcatatcagctgtagactaagaaagctaattactaaatgcatttaaaataactaagtcacttcactgttgtatacttctctggggttgaatttcccaggattcacctacgaattatgtattgtatactaggccatctaagagaagccagttgaaaaactggaaagaaaacctgcttctcatagtatctttttaaaaacaaaaatgacacatactcaaatacctaagagcaacacaaaaaagacctaaaaaatctaagagatgcatgttcaaaataattctttagtcaaaatacttgggaaacatgtagttttttgttttttggtttttttaaaatctcartgccttgtcagtttggcttttggggtcccggtctttcaggtttctcactatacctttgaccgcatgtcatcctctttagcaccccccccccacttttttttttccaagattctcatttgttaagcactaaccaggtatcagatgctgtcctgcgcacttgggatagagaatgggaagaaagatccccgcccttctggagcttctacttcagcaaataagtgcataaagactttgggtaccagctcccatttcctcactgctcatgtaatttcatgccatatgcaaagcgatttccaagttcccacctctttgcagaaactgcccttggtttggttatcagtgacttaattgccaacccttatcaatttgtgtctactttaacctttgaaactcttattctttgatgcctatgacacagcttttctctgtgttgaattaattattaaattagtaatgactagttaatacagtctccacattgacatgaaatgtggttataattgagcaggcaaacttgagtctccaatagacattgctgtggaaaacaaagttgagatctagctaaaaccattggaactaacaggttgagattataacagtaaaatattcacttagctgctgttatttcaagtcttaaacactgaaattatgtcgtgtaccaacactaaattcaagctgtcattaatgaataacaacatgaaattcaaactgtcattattgaataacaacagaggagattaaaactgttcccaacttgcagttattacaaatgtgctaacaaacacaatttgtgttccttgccccttctaccgtcttggaaaaaaaagcaggtttttttttttttggtttctgttgggtaacaaagaatttatgctcaccaagttatatgatcttttctctgcctaactcttaagtgtcctacctaccatccttgtgcaggcttcctgggtgatctccccatcttcaggacattctctgagcctactccccaggtctttctacaactcgggtttttcttctgggcaccagccctgaagacctagccacttagagggcctctttttctgtctgttctcttggcctcgtaagtccatcatgtcatgacacctctttatctctaacctctgaacacccaagccaaaacctaagccatcccctactctcagtctccccttggtcaccagtgcctgctactttgactttagtatcactctccccacatctttcctcagccttttccttgacaggtgcagtattttaactgcttccctgtctttctagtctttcccccttccaagctcttcaccatactgccaccagtgaagtttgaaaacaatagttggccggacgcggtggctcacgcctgtaatcccagcattttgggaggccgaggcragcagatcatgaggtcaggagatcgagaccatcctggctaacacggtgaaaccccatctctactaaaaatacaaaaacaaaattagccagtcgtggtggtgggcacctgtagtcccagctactcgggaggctgaggcggaagaatggcgtgaacccaggaggtggagctttcagtgagccgagagcgcgccactgcaccccagcctgggcgacagagtgagactccatctcaaaaaaataaaaggaagaaagaaagaaaacaatagttaacatgtccaaatcccttttgcatccctcactgactgaagggataggaaggcaacaagccagtagaagagaaaatgctttgctaaacatcatcgtatgtctgtgtcttatttttcttttttgactatttaatcttatttcacttaggaccttggttatttatattagttgtctataggcagtggaacataattaaataccattttctagttaaattcacctaagacaacttttaaacaaaactcttgcgttaaatgttgccattaatgaagcgttgttaacttgcccctctctgcccagcaccttccttctctgacttcactgcttggggagcatgctaatgattccttggtgttaataactttgcaattcttaaacaggtgacattccaagcctgcagtatatctgaggccagatacctttatgatcagttggctactatctgtccaattgttgtaagtagaaattacctcttattttaaatactacttcgtatgaaataagatagcatgtgcagaatttactgacagtgtgctatttaagtccagttaagacctcagtcagagatggactaatataaatagtatgtaggtttaggtataatgaactgagagtctacactgtagaagtttactcttgctagtacaacattgatttgttaaatgtgaagtttgaatgtggccattttccctcccccatacttcatgtcctcacattagagagaggatgatttaagtgaatcaaacccaaggaactggattcttcctggtatatttcactgtaagataggcacaggtacatgtgctctgtatgggttgcataaacatgctttttgatcagaaatataactgcatggagctttttttagcatgtaagtgacactttgaatttgcaggagctgacttttgtttgtttttagatggctttgagtgctgcatctcccttttaccgaggctatgtgtcagacattgattgtcgctggggagtgatttctgcatctgtagatgatagaactcgggaggagcgaggactggaggtgggaattgtttttccttaatagcccttttaagtcaagcaggtaaaatggatcttttgtaactacttgcaatttcaggatgtctccctgcaatttttatctgaaatggggaaaaagatttggtctaggtggggagttaatttttatcgtatgttgatgtctgtatttgttttagcttcatttaaaattagtagtscgatttttctatattttggaagtgctgatggctgtttttaccaaaaggctttttggtgccacatgagtgttttgtatatggtgctttctgctgtggaaagtataatttgttgtcagagattctttttccatgtaaaaggttaggcattgactaataagggtgagatggcacctcttgtttgcatgttgaactgtaaagtaacccttgcatctctccaacaaggggtgtgcatcagaaccacccatggaaatctttgaaaatagacacccagaccctatcctagacctactaaataagaatctctaggatgggacccgaacaagggtgtttttaaaggagccctcataagtggttttgatattctcaaccagggctatactactactgctctggtcttcatgtaattgttcataaattgttgaacatgctttctaagtagaaataaactttaaaggataattattttgataggtttatcttacgttatagatttatttatttatttgcttttaaccttagtatttattttccctagcttaataagaatgaaagtgatctgcttttaaaagataaaagtatatttaaatcataccagaaaaaaagggtatttaaaytgccttcagattttaaaaaacataattttccttaataatactttttagggctcactaactttttttctgtatcttatgttgaggtttttatataattatcatatataaaaatatattccactcattttatatagcatattcatttatatatatttttaatctttagccattgaagaacaataactataggatcagtaaatcccgatatgactcaatagacagctatttatctaagtgtggtgagaaatataatgacatcgacttgacgatagataaagagatctacgaacagctgttgcaggaaggtgggtttctactccatctttctgggtttgaatgtacgcctttagttcttcaaagctcttttacacttttttgctgactcctggtctggtttctatttttagtgcaaagtctttaacttctctcatgaggctrcttgttcctaaagtttcaggttccaaatacttgtgagattttcttgatttttagcaaaaggagcttactttggaggtctgtgtctaggtccacaccagtgccccagcaggcattgtgtaagtagtgaataaaacgctgacactcccgcagtgtccgcaggataaaatactgggtgaggtgaggatactaatcaaaccagctatttcaagcttctagacaccctttcttcaaacttcctgagctatcctgtcgtctttctggactaagaggaagtggtatctctcgctttgcagtgagttcccatgtgatctctttttgcaggcattgatcatctcctggcccagcatgttgctcatctctttattagagacccactgacactgtttgaagagaaaatacacctggatgatgctaatgagtctgaccattttgaggtatcttctcagttttatttttatttatttatgtattgacttctgagagtctggaatcctctgttttatatgcatttcacttcacaaaccaacatggggaggcagttttctgtacctgtggagaacacaaaagaaatttcataagactttcatttacccagtgcagtaaagaacttggacaaataaaaaatcggtttcaagtactcttattttacgattcttactgtttatctcactgattctaatttttytttttattgttcagtattttcttatttgcctagtggtgaaaaattcaaacatacactgcacaaaaaataacctgatcagttatttcagtgcttcagacatatcaccttttttttttgtagatagacttctcatagatttatttctgtgtcatgttatatgtagacattgacatatataccttttgaaataccatctatatcccctttctttcccccaccaaactcacaaaaggagatataaatccttccagtcttgccatcgggtcccaagatggtcaggacggagaaagaactctctctcagtgtattgagaaacagctacccttcttaggctcttgggtcatcgaagcagcagcattcccaggagaggaggaagaaaggaaacaactgtcatgtgacagggttctcagatgaaagtgtccagtgtcacctggaaaggcaggctggctcctaaaattctcagggatgaaggtgggggccccgtggctcttcagatgctgctctgtagctgggagatagggagtaggagctgggtgagattaagcttgcagtgatagggcctcatagcttttsttaaacacttggctgttttgttttcctaaaagagcacactcgaagaaaatcttcaattgtacctttttgtctttgtcaattgaaatttggtatggacagtgagcagtcttcttccttaattaaataccagatcawcttaatattttcctggatgtgtgaaaagttggttttcttctctgcttttgtatcacagaatattcagtccacaaattggcagacaatgagatttaagccccytcctccaaactcagacattggatggagagtagaatttcgacccatggaggtaagacacatgcatcagcaagaactgactcaaaagtactctttcgccagctgttcatcacccttctgatgctgctatgagaaggctcttatatataaaataaaaattaagtatgtgcatggtagcaagtcagtccaagttaaggagggttgatttctgagaatagatgtgggcaaagggcttccagacccagatggggaattagnagatggcttgggaatgacatgatctgaggaagggcctgggtcagggaagagcatgtttgtgtagttgrttcataacttctctgggcttctgcttgtctaggtgcaattaacagactttgagaactctgcctatgtggtgtttgtggtactgctcaccagagtgatcctttcctacaaattggattttctcattycactgtcaaaggtaaggatatgtttctttatggtgatgggtatagatctatctgtagatatatttatttatatatgctatttatttcccacctnatttcatttgaaattgtttaccctttgcaataaaatgtttctccatcagccctattctttattttcttttaaacctaagcttaatttctagangctttccattcaagatgattgatggctagaagtagtcctacacattgatttcatccaccacaaaatcccaggttgattacaatgttaaattaggatggggagggaaagtgtaactgctggaatgccggtaaaagtctcctcagtagaactgaacttgagatatttctgaagaattcggatgggattgaactctcagaaaaacaaattggagttaatctgccccccaaaagaccaaaaaacaagctttctgggaggagtttgccagcaaaacaactccaggtgatgagggagcagagctgtgggttgtggagcagtagctgaggaggtgaacgcctttggtttctgggccagggttcctcttggcagagagtggctgggaaaaactgctaaatagagagggccctgccgcaggggttcctggttgagggtttcggggccrgagaatggagaagtagggtagccctgtcacagcaaacatggaagcaagaatgaaactgcttagctccagcatctgcccctggggcatctscttcctccatgaggggtttgccagactgtgctcatccccacaccccctgaaggaaatctggctgtcagcccatccctgcctgctcctcacacccagaccaaaggtcacccacagaactctgtgggcccacattgccctcatgcctacctactggggagaccaaatccatctaagagagattccatgtaagctaccagtctaagcctttgcttataaataagaatagatgcttggaaggcaacagaaaattgagaacaattaacagccttaaagagaagggcctactggtcttgcaagggcatactctgtaaagtcaaacttagttacttcaaggaagtaagctgggcccagcgcaaatctataatctctgctcctcaggaggctgaggcaggaggattgcttgaatccaggaattctagtgcagccccgacaacattgccagatcccatctcttgaaaaaaaaaagcaactggaaagaattactattttttaaaaaatacttttaaaccttttttagagacagggtctcactatgttgctcaggctggtctcgaactcctgggctgaaatgatcgtcctcctgctgcctcagccttccaggtagctggaattacagacacaaaccaccatgctcagctttggaaagagttcttaaaggaattctaattagtggcctcagacaaattctagagagkttcagtcacatccataaaacaagtattatagattgtgcttatttaatggtgagtattctcaccagtagagcagatgttgaatatccaaggtagtgatttaaaagaccaaatgaagattaatcccagcaggatggtgaagaaatggaaattatggaaatcctgaagcatggaaagctctggaaaattcaatgtttgtgtaataatttagaagaggagaatagtttatataggaaagatatacaataatcaaagaaataatagaatttttccttaataagtcttccttaaggatgagacaaatatttaactcaaatgtaggcatttattaatctcaaagagaaaattaactgtccggacaggagaaaaaattaggagacatgaaaaggggggaaaatcaactgatattacttttcatttgcaacattaaatgctagatggaaagaagttttcagaatctcgagaggtaaagaattaacaaccacagaattatcktctcagccaaattattctttaaatttcaggtgattctaacaaaactgaatggatcaagttagggctaaaagtatgccagaagtcttatctagtgtcttggtttgtttgggctgctgtaacaaaaataccttacagtgggtggcttataaacaacaggaatgtattgctcacagttctggaggctgggaagttcacgatcaagtcaccggcagtttcggtgtgtggtgagagcttttgctctctggttcatacatggtgccttcttgctgtgttcttacatggtggaaggagctaactagctcttcagatgtctcttcgtaataccagttatgagggtagggccttcatgacctcccaaaggaggtcctcccaattgcctcccaaaggccctactttctaatactgtcacaatgggcattaggcgtcagtgtatgaatttaagggaacacaracattcagaccatagcaccttgtaaggggatatggaaggagatgaatggtagatactcattagtgcttgacacttagagagttataatttcaaaactacctctttaaggaaaactattaatagtatagaaacaggatttattacttttaaacttgctggcgaaagggtggcaaaatgaaccacaaatacatttcagtgccacaaaattgggtgtggggccaggggagtgatgaaacaatagcccatagaacataaagtggtgaaaataaaatgaaaacaaatttgaatagactaaactctatcctattaaacagctgaaacagataatataaaatagcaacacagtttgcataagatgtacgtagaacaaggacagatgccgacaagagctgcatagtgaccttttggaatgatagcaggaatggcaaagcaatatcaggcaaaatgtgaggtagaaattattaaatgggatagagaaagcagttttatatattcttccaagatgatgtgaaagctgtggtcctttttgtaccatgaaatgtaacatgaaaagagtttagtgtgatgggtaatacatggctttgatgtgagaactaaatgcataaatccctggtactatttactaggcttttaacctggacaagtgacttattctcagtgcctcagtttcccacatgtatcccagaggggaataagtaggctgttgtaagcccgtgtggggattaatggaggtaaaccacttaacagagtaccttgcatgttactcagtaactgacaggccatataatcaaaggatgggaaaggccatgggggaattaaaggcatggttaataagcttggttgtatgcgtatattacrtatctcataccacatcttttttcaaatgccatgagtaagatttacaaaaattaaagaaaatcttcacttctcaaaagtagacataatacagcatgcgttcccgctaaaattcaacgaaagagatactctggagaaatttaacattggaaattaaaaatgtctttccaagtagattttagattaaccaaaactagaattacagattgtgtaggaaagtgaaagacatgctggcagagctgatgtctaaggaaaaattatagctttaaatgtcttaacaaaaagattttaaatctaagtcattgagtatctaaagagcaaagtaaaatatactttgaaaggaagtcatcaaagcacaaattataagtggtcgttatgaacttttttcaagactaaggaaaaaagaaacaratattaataatgaaagcagatgttcacagccatggtggaatgtatactatttatttgagtatgctcctagagtatctagattcttcagaaggtcctgtgtgtctcttaaaaaatgaaaccataacaatcgcactccctgcataatgaatatgggaggagacttggtaatcaagagagcttatgtaccatctgtcccatgtcagcctggccctctaactggtcactgttgtatatattgaggtcccacataagatttcattatagaaaataagggattactactaaaacgttttttaaattctgctttgagagtcttaaaaagtcattggagatacagagaattcacaaataaaacagttttcggtttcatgagtgagtctacatgtccggaggcaccagatgggtaaaacagcagtgatcttctgcccttgggagggctgtaaccttattccagatatgacaacctatgaactgtctttgcctttcctcactaaagtggggaggcaaaaccccaatggcraggcagcaggggaagagcactcaacttagaagaaccgggttataggccgggcrcggtggctcacgcctgtaatcccagcactttgggagtctgaagcgggcagatcacttgaggtcaggagttcgaaaccagcctggccaacatggtgaaaccccgtctctactaaaaatacaaaaaaattagccgagtgtggtggtgcaggcctgtaatcccagctgcttgggaggctgaggcacaaagaattgcttgaacccaggagacagaggttggggtgagatgagattgcaccactgcactccaacctgggcaacagagcgagactccatctcaaaaaaacagaagaagaactgggttctagtcctgccttctgccttcgttaccctgggactcctggtgagacactgctatataaagggaaccagccacctgccctcccaacactgtatatctgttgcaaggctcagtcacagaggtgctttgaaatgcagacgttccacatgaatataagttttgggttttaagtttctcttaaaattccctgattggttgaaaaatcacataccaatccatgattgagtgatacagtcctcacataaataaaaagcctgttcctcccactgggaagcatttgagcagaaagtagaatccctaagggaatgagtcctaattgcaaaggtgaggaaggtnctgcaacttgtatgtctgatcaagaatattttgacttagtcrtgattctttttttcccttaggttgatgagaacatgaaggtagcacagaaaagagatgctgtcttgcagggaatgttttatttcaggaaagatatttgcaaaggtattacattatcttagatttctaatgtcagcttatgctgcaacaagctgctaaagmtcccctgaccctcttctccggcaggtggcaatgcagtggtggatggttgtggcaaggcccagaacagcacrgagctcgctgcagaggagtacaccctcatgagcatagayaccatcatcaatgggaaggtaggagggtggccctgtacagtacscctcactgtgcacatcccccggcagggagttcataaagtgtcctgcttcttgtaggaaggtgtgtttcctggactgatcccaattctgaactcttaccttgaaaacatggaagtggatgtggacaccagatgtagtattctgaactacctaaagctaattaagaagagagcatctggtatgatatctatttttcttaatctcataatatagacagcatggtataatcttagaatgttcaatttcttaaagtagtcttttaaaataatgctgtattcatgcacagtttcacatttttatatttctgcaattgtattcaccttataatctttgacactcataatttagattagtagtgctttttttcttatcagttcataaaataggggtgcatctgaaaatcactggcatcttagatgatgaaatggcatctggattgcttacttatcatttacrtccaactgtgttgatcttacatcatcatgggcccttttatagggctaaggaactctgtaagttaaataagctgaacagttctttagcctgcctttgtacatacagtgaggctcctgagaatcccctttctttgttagttttgaggaggttacatttacaatacagtacagtaaccaagtactgctaacacagtacttggcacaagggagctgtcagctgttaataaagtgacagcaataatggtaatggcatctgtatttaactcaaggcttctgtaaactttctggagtcacaaaggatagccgtagaaccctacctcacccctcaaatggtatactgccaatttcccacttcattcactytacttactgttctttattctctccacctctttgatcaaagatcgctcaaggaccctacagtcctctgaggcagtctcatgacactggcatttgtagtcctagccctctggccaaatgggagggcacatgttcttgtacacatgtgctggctcctgttccttaagagctggcagtgtcagcatatgggtggcatctaacaggtaccatagaaactggatgtatgtgttctcattgcctgcctgcaacctagaattcctgcccaggaggagttcttcaaacgctatgaaagatgttcccaccccctgccatgcagctacactaaaaggacatattgatttctctccagaattgtgtttatgctgaccactaaatatcaacttattaaaaaaaaaacttacgtggttttaatttttttttcgctcccccsycgcccacaggagaactaatgacagttgccagatggatgagggagtttatcgcaaaccatcctgactacaagcaagacagtgtcataactgatgaaatgaattatagccttattttgaagtgtaaccaaattgcaaatgaattatgtgaatgcccagagttacttggatcagcatttaggaaagtaaaatatagtggaagtaaaactgactcatccaactagacattctacagaaagaaaaatgcattattgacgaactggctacagtaccatgcctctcagccagcccgtgtgtataatatgaagaccaaatgatagaactgtactgttttctgggccagtgagccagaaattgattaaggctttctttggtaggtaaatctagagtttatacagtgtacatgtacatagtaaagtatttttgattaacaatgtattttaataacatatctaaagtcatcatgaactggcttgtacatttttaaattcttactctggagcaacctactgtctaagcagttttgtaaatgtactggtaattgtacaatacttgcattccagagttaaaatgtttactgtaaatttttgttcttttaaagactacctgggacctgatttattgaaatttttctctttaaaaacattttctctcgttaattttcctttgtcatttcctttgttgtctacattaaatcacttgaatccattgaaagtgcttcaagggtaatcttgggtttctagcaccttatctatgatgtttcttttgcaattggaataatcacttggtcaccttgccccaagctttcccctctgaataaatacccattgaactctgatggctgttatcaaaggaacttttctttgtttaaatttgctgatgcaggaattaagtttaaacacaactctatagaaagaaaggagattattacccagaattcacatgtagtgattattaaggacaatttttttttttaactaaaaaagttggyggcaggggtggggggtggcaatcatttttcttcctatacatacaaaggatattgtcaaaaatggcgttcttctcttgtggcctgttattctgattgctgctgtatacagttttgtcactctttagtttttagttaagcatactgatagactttcctctaaaagccattcactccagattttacctggggaatattctacatactgcttactttctctataaaactcatcaataaatcatgaaaggcactgagttttgtaaatcaggaccctaaatgtttaattgtaaataagtttcagataattattatagctttgcgttgaagtttgttgttttttttctcaactagttaagtcaactgcttctgaaataactctgtattgtagattatgcagatctttacaggcataaatatttaaactgtaatatgctaacttgaagagattgcaataaagctgcttcagctaaccctgtttatgtttaaatactagggtttgttctatattttatacatgcattttggatgattaaagaatgcctggttttcgtttgcaatttgcttgtgtaaatcaggttgtaaaaaggcagataaattgaaatgtttgtggtatgaggaaataaaagaatggaattagctttcattcagaaacctttgagtgtgtgtgagttccacagctaaacaaatagtagaagagtttggtttttgtaattaacccaaataccatgaaattattttttcatcattgcgacctcagatgtttctagaaagaagcatagtgatgaagacaaacagatgccstatctcccctagtagctatcaaccccggtggggagaaagaacttgaagtgtgactgaattgactgctgtgccactggaagattttttttttcttttttactcccaactgctgttgtgctgggtcagtgggtacatggtgaatgaatgttgagtaacctgggtgctgtgcacactgcagtctaagcaggagatacttttctaagcaggagatacttagactgtgagtcagcaagtcctgcagagagctgttttcgactcctgtctttggatcagtattcacccacacacacacagagttcgtgaaataatgttcatctgagaaacacacttttctcagagctctaatttctttatttgaatgttcctagggcagtgcttatcaaactgtagtctacatacaaatctctttggggtgtcattctggcttggtaagtctggggtggggcccacatttcttaacaagctcccaggtgatgctgatgctgtggatttgctggccccatgaataataaggactttctctacctgagttatggacacatcaatatcaagtctcaaataacacttgcttttaagtctaatgtgatatgtctacattttctcttattaaagaccagatagtggtcttctttctccaggacagagaatgtaagcctcacagctctcatgagctttaccatctgaacacagctaagaatttgggattttaggaacagaactgtaaatcttaaaacaagcaaaaagtgctttctccttggtagaaatacctgtggccaagcccagaccttcagatcctaacttgggatacaactgattgttacttaacctgctgctaacctaaagactagttttctgctcatctagtcccctgtgtgaataagaggtttcctcctggtcccaggatgcctctgctgctcagctcatctctgaggctgtctgtgagccttcagttcagaaattgagggaaaatccattgccttggatgtctccttccaaatcaccacccaaaacaaaaattaggagacgtagaaatccaggatgtgttgtgggttaggccatattctgaggagttggaaggtttcttggggacctgaagtctcgtgaagagaaaatgtggaaataagtgtccttcaagccattgtagtgcttgacatgggggaaagaggccagggggagggggacctgtggtgccagggcctttcagagcttggctagatgagggggtccttctcagaactgtaaataagctgctcagttgcatgattttcagaggccctgctaatgagctttttgtttgggttaagcctcccctgctttccctgaagataagccactgagttctatcagctgctgtcttctctccattatgctttcgtataaatatttaacatttcctataaacaattctggaagtacatgccaagtgatacttatggaagtgtaagaagatgtttcagttcaggctgctataactaccacagactgagtgacttacacaactgacatttgttactgttagggaggctggaagtgcaagagcaaggcactggcggattcagctcctggtgagcgctcttcatggtttgcagatggttgtcttgctgcgtcccatgtgttggagagatcatttctcttgtatctctccttatctaaggacactaatcccattcatgagggttccaccctatgacctaattacctcccaatggccccaactccaaataccctcatactaggggttaggcttcaacacagggatctgggggagacattcagtccataacagaagggaatgggaaaggactactgtaagtgaagaggccttggtgggcaaccttggctgggaaacatatattcctcactattgtgctttcctggtaagcagaggctgagataagctagataatccctaaagcaagccccttttcattctcaatattctataaaatgaaacattacaaatctaagtatggaagatgcattaaagagaaccgtgagctgggtgcagcctgggcaacataatgagacccccatgtttacaaaacaaaattagctggatgtggtggtgtgcacctgcagtcctagctactcaggagactgaggtgggaggatcacttgagcccaggaaatcgaggctgcagtgagctgtgatcatgccactggactccagcctgttacctctggatggaaatgaacaagtaccaaagagacaaacttctaggttgctagacatgttttatatctcaatctgggtgacgattcatggatatcaagatgtttaaaaatgactggctgtacacttaagatgagggcagtttacacattttgggtttgttatgcctcaaacagaagcaaaatgtgggttaaactggttcagaaaggaggaaggagaaaagaaacttttctgagcaaaaactagtgtattagtccgttttcacactgctgataaagacatacctgagactgggtaatttataaagaaaaaggggtttaatggactcacagttccacgcagctggggagacttcacaatcatggcagaaggcaaaaggcacgtcattcatggcagcaggcgaagagaatgagaatcaagccaaaggggaaaccccttataaaatcattagatctcgtgagacttactaacatgagaacagtatgggggaaaccgccccccatgattcaattatctcccaccaggtcccacccacaatacgtgggaattatgggagctacaattcaagatgagatttgggtgaagacacagccaaactgtatcatagcgtggcgaatgtgttgaaaaactgcatttttatgcccttttaatacattacactttcatcatggcaaatgaaagcagtttaaaagccaacatctcaatcaaaagtgattcattctgaagttcctaggaagtttatcagcattgtgttgggacaggatacaagtacttctagcataaaagcaaaagtatagaactgagttccaatcttaatatttatacatactagctgggtgactttagactttgtctatatatcatctgtgaaatagacatgagaacacttcgccgatttgctatgtggtggaaataaggcaatgtacataaaagcaaaggacataaactgttcaggcaagccatgtttgctccctactctgcccctggagagtgtgacaacactattatattaaagacgacacaacctgcatctactttctaccagtatataacacacattttcttaatagtctcctttgaaataatttagccttccaagaatgcaatgaagtcagcagagaaaaacaatcatactgatgacttaggatctaaaatttctagaaaatgaaacatgagaagctcttcatatgtttttatcacctctcaaacagtcctggtgagtttcccagaaccttttttggctttgtccaaaataaagccatgtgttttgaatactattggtctttctgcaaagtagagacgcttggcatattcagaaattttggatgcaagtgacagaaaacccccacacccaccagctttagaaaaaaagaaaacctaccagctaatatcacagaaacgtccaagaggtggcactagcttcaggcacaggttattggctcaaatgctctcaagtcccgtctcccgattcctggcttacaccttccactataacggtttcactctcaggcaggctttctccatagagcacactcccccagtgcccagccctatccagcagctccagcaacgccaggcatgcattacagtagctgggcaaccccagtggaaaagagcctctcatttgccacaagtgtataggaaagtctgggtctgtctgagtttgtgcagaatcatgatgtgattctctaatgagtcaggagactggggttctagttctgactctacaactagtgtttgtatgatattaagcaagtcatttcctttctttggacctcaattgtctcatctataaaacagaggaataaaatctcaatgccatcttgagtcagttttagagctaacaacatttcttaagttatccacactaaaaactgtttcctctggaagtttgataatagtgccctctagcgatcttttcagtaggtgcctttttatttcatttggtgtacaaatattcctcaattcacagagacattcagagcgcatttgctataaaacgaaattccacatcgaaatatatttttccattctcattttaaaatagaaatatgcttgtgctccaaaataagtagctaaaactgtggatttcacatttattactgttttagctgcatcttggtcgttcggttatattgtactttcattgttgttcttcgtacgtgttttctactatcccttgtgatttcttctttggccatgggttacttagtagaatgtggcttcatttcaaaacctttgggaattttctagatgtcttttttattattgatgtctagtatagtttcattttgatcatagaatattctgttatttcaatgtgttgaatgtttsaccttttaatagcccagggtacagtctttcttgatgaatattccatgtacacttcagaataatatataattggtgtgtatagtgtgtagttttctttagtagttgaatttttgataatgttcttcaaatcatctgtatccttgctgcttttctttgcctacttttttttcaattactgagagtggaatgttaaaatcccaaaatttgattgtggatttgtctgtttctctatagttttgtcagtttttgcctcatacactatgaagctctgttaggtatcttcacacttaggaattgtatgtcttcttgatgaattgatccttctatcataataaagtatccctttttaatctctaggaatactcttgttttgaactttactttgtctgatattaatactccatgtcaactttcttacaattagtgcttacataataaatattttctatctttttacttgcaaactagctatgattttagaattaaagtgtttccctttaaacagcttctagttgggtctttctttttttatcctttttaatggaagtgcttagttcattaacatttactgtaataattgatatggttgagtttaagtctaccatcttgttagtttcctatttgtttctaatgttctctttcctttaatgcacttttcctgtcatcttttggtatcctattttatgtcctctattaacttaataatatcttgtatttaaaaatgatttctccaaacaaccccatcaaaaactgtgcaaaggatatgaagagacacttctcaaaagaagacatttatggggccaaaaaacatggggaaaaagctcatcattactggtcaatacagaaatgcaagtcaaaaccaaaatgagatagcatctcacaccagttaaaatggtgatcattaaaaagtcaggaaacaacagatgctggagaggatgtggagaaataggaatgcttttacactgttggtgggagtgcaaattagttcaaccattgtggaacacagtgtggtgattcctcaaggatctagaaccagaaataccatttgacgcagtgatcccattactagatatatacccaaaggatcgtaaatcattctactataaagactcatgcacacgtatgtttattgcagcactattcacaatagcaaagacttggaaccaacccaaatgcccatcagtggtagactggataaagaaaatgtggcacatatacaccatggaatactatgcagccataaaaaaggatgagttcatgtcctttgcagggacatggatgaagctggaaaccaccattctcagcaaactaacacaagaacagaaaacgaaacaccacatgt

SEQ ID NO: 95006 - DNA, 25065 bp, Homo sapiens
aagggaaccgccaagcagatattgaagccaaaagagctgcaaggcaggactctccattagaaatgcttatagaaagacttctagtatggggtaatcccttctgggaaatgaagccccagtactcagaagaagaaatagaatggggaacctcacaaggacatagtttcctcccctcaggatggctagccactgaagaaggaaaaatacttttgcctgcagctaaccaacagaaattacttaaaacccttcaccaaacctttcacttaggcattgatagcacccatcagatggccaaattattatttactggaccaggccttttcaaaactatcaagcagatagtcagggcctgtgaagtgtgccaaagaaataatcccctgcactgcaggccatacatttcaatccctatatctttaaccgccttgttaagtttgtctcttccagaatcgaagctgtaaacctaaaaattgttcttcaaatggagccccagatgcaatccatggctaagatctaccgcagacctctggactggcctgctagcccatgcttcgatgttaatgacattgaaggcacccctcttgaagaaatctcaactgcacaacccctagtatgccccaattcagcaggaagcagttagagcagtcatcagccaacctccccaacagcacttgggttttcctgttgagaaggggtactgagagacaggactggctggatttcctaggccgactaagaatccctaagcctagctgggaagttgagtgtatgcacctttaaacacggggcttgcaacttagctcacacccaaccaatcaggtagtaaagtaaaggcagtgagggcaagagggctagaaagtctgaaagtgagcatggctaggtgagggaggaagagtggccaacatgaggctggacaaataaagaaggtgggttatgcagggctttgtaaactctgttgagtttggatttcaccctgagggcattaatggctcactgaaggttttgagccagaaaatcatgcagaaggcccaagaacaccaagtccagtgtgcagaacactgcagcactggggccagaagagagggcaacctgctgactggacagagattgagaaggaaatggtaggacacacagggagatgggggagtaagggttgatggcagatttccagcctgggcaactgggtggaccaacagtgtggagctttaatctctgagatttgaaacctgatttcagtttgggacagggtcagttggagttgcctgaggggtgggtaggtgaacatgccagaaggcagatgtacaggatcgggggtctgatgcccaggaaaaaggtctgtgcagagtatcttcccagaaacctgccctgcagttcagttgctgatttcactaaactcttctggccacacctaacggagttaatgtgcccaactagagttgcccagacctttctctatctcagagagacgtgggagggattgctgtcccaggggaaaacggatcagagtggctcttcccagggctggctccaggtatggaagttgacaccatcctgtctcactccatgaatgggatgtgcctgtgttataggagtcctaaccagtgaccgggacacactctccactctctctcctcacaccccccacagaatgggacacaagccgtgtcaactctacctcctaactacctcacatatctctttccttgtcccatctccttccactgtgtgggtcagagcctcatggtttctcatctccaccaccccagggtcctcccagtgggtctccttgctggcagcttcacttcgctctagtctcttcttcacttacaaccagagtaggtttgctcaaacacaaatctgaatatcactgtctttctttaaattcttcagtgagtctccatgtcatgcaggatgcatcctcaccacagtcctcactctgtcatctccagctcaataagccccttgggaacagcaaggcctcctttctccctgcctgggtgcatttgctagccctacctggcaagctccttcccactggccacatctaactcctatctcattgctttctgggagctttggcctctcctctgtgccctcccagagtcctggtgagcctctaataacacctgagggacactgtgtctgcacaatagtcctgtgacctcctggtgtggggcatggcctgctggatccccattcctgcaccaccaatgaacaataacacctgcacagctccacgcatattttgaggaactgaggatatgaggctgggctttgagatctcacaaatccccacaccctctgccctactctgtatctcatccatttctgcaaaacatactgacaaatgtccctcaaattctatgtatggacttcgtgggtcctgacaaaaataaaccaatggcaaagaaatttttatgagacaattgaggaagtgtgcatgcagttatttgacaaaattaagaaacataaatttttagtgttagaatagaatggtgatgtccagaaaaaaagcacttacattttaaagaaacatactaaagtatacctccagcaatactaaaatgcatatgcagtgttattcattgcagcattgtttgtaattccaaaacattagaaacaacctaaatgtccacacatacaagagtgcttgcaggccaggcatggtggctcacatctgtaatcccagcactttggggggccgaggtgggccgatcatgcggtcaggtgttcaagaccagcctggccaaatatggtgaaactctgtctctaataaaaatacaaaaattagccagacgtggtggtgcgcacctgtagtccatagtcccagctacttgggaggctgaggcagaagaatcacttgaatctgggaggcagaggttgccgacagccgaggtcatgccactggactccagcctgggtgacagagtgagactttgtctcaaaaaaatgaataaataaataaagagtgcttgcataaactatgatgcattcatacgatggagtattttgcagctgtagcaaataaaggaagacatctatgaacttagatggtggtgatttctaggacctatcattaagtgaagggtgggggaaccaacaaccacacaaaacaaagagcaaaaaagtattatggtatgctgccctttatgtaagaaagaaggggttgtaaggaaatatgtacttgagcaaaagaaaaacaaaaggggaaagttagaaattagtgagatttgttgtctacagggggatgagtgagaaatgggtgggaaaaagagggactaggaatggggaattagggacagagagagacagtgtctccaaagacactttttcatataactctggctcttagaatcatggtaaagttttgcataccagaaaactaagtaattaattaaaaccaaccaggatgtaaggaaaccgcaaagtggaatatacaaacactaacaacctaacagcatttcaaatgaatagattaccaaactgaaggaggtgggggggaaaagaactgacctaaataaccacagaaaaccacaattttgactggatattgtaaggcttaagaccaaaaaaaaaaaaaaaaaaaaaagaaggaaagaaaaatactgtactcttgttagtagatttgtttttcacagaggtatgcattggcaattctgcaactattttacttgtactaggattaaacaaatatgcaaatattgtatattttagataatcatagccaggtttctcacttgtcagagaggttagaaatgaaaggacacggctaaatgaatctattgaattgaaatagtaggtatctgtatgaactcatggttttttatcatatttatacagatagctatataaatacatacagaagtgtatgtatgtgtgggttaatatacatacatatatttcccactggggagagcctagaagcattgaaaacccagaagcaatgagtacacatagttccgagatcctagttttcaaataccttccccaataaaaggaaacaaggatctttggagaaatggttgacttcaaggctgggacacagacaagacaagataagcctggaacatctttggcacagaaagtatctggaaatgctcacaataagagaggaggtttgccataaaagacacagaagccaatctgaaggagctcccacaggctaaaggtggatcaatttgagcaataaaatagatatcgatggtattagattgtaacctttagaataaaatatctataaatctgtactaagaaaataattgaatgaatggaaggataaataaaggagaagagacagcttttctttacagaagaattcgaattattaaatgtagatggaatgagggaaatagaaagtcactattagacaaacactacagtaatatttgctgcaggcaagatccataatggatgctaaagttagtgagcagaagcttattttgaaactgactatttttatagtcacaaagtatcttccacaagatatttatgaattccaaagggataaatagtaatattacggttgatgaacctggcagacgctactttaatcaagggattaaggttaagatcaaaattaataagacataccatgtctcggatatgaaattatgggtggaaatgatcagctgagactggaacaactgctgtgacattttgcaaaaaatgtatgtcgtcaatcgagtcatgagaaaacatcagatagacccaaattgaggtacattccacaaaataattgaccattactcttcaaaaatgccaccatcatgaaagacaagaaaagactgaggaactgccatagtttggaggtaactaaggagatgtgacaacgaaatgcagtgctggggtcctggatgggatcctgggttagaaaaaagatactgattgaaaaactggtgaaattcaagtaaggcctggagtttagtcaatagtgtatcaacattaaattcctggattcaatcattgtactatggttacataagatgttaacattagcggatgctgggtgaggggtatttgggaaacttgtactagttttgcaatttttctgttacataaataactcccccacccacaagtttaaaagatacagattagattatagaggaaaaaaactaagtctgagatttgcttcaaatattgtcaataatttttgaagcaaggtgatgggtacatcaaggctttgtagtgttctttccagatttatgtatatcagacaatttcctttagaaaagtagaaattacatatacgtgtattaagccctttctatgtccaggcactgtggttagccacggggacttggttaaccaccaggacttgaggccctgcctcaaggagctcatactcaacagggggaaagcagacatgatgcacggaatgtagaaagagtgatgtgatagaggaagcacaggatgccttggagcaggggagaaaagagtgctccaaataggagaaacagcatgcagagccttgggctagggagaaaggctaactggtaagtcacagagaaaaatctgcaaatgacctcggggaatgcagctgaggtcttttgtctgcccagggcaaggacaactcagccagattctttgggcctataaaattttgtgacattatttgtaatttagtctttttaaacaaatttagaaggcaatctccctatgctctttatcaagtcccctttcctgacatctcctatgactctcctatgacactttcctcctctccccacaatgttttctcatctgtcataaatctgcagcctatttaacaagatcctccttaagcagtgttcacaggatacttggtccccagtgaccttctgaggcagccaaatagatatgaaatctttttgtgcatttatggatagccttgaaattaattgctgtcattttcttcctagcagatcatggaactctggagactaaagtggtgtgggagtggctgctcccaactagactccacccccttcagaaggcaggagttgtcatagtattaaaacagctaacatacacatcaggaggtggccttgagaagctgagcggagaccggctagactttactcaagttagtattgaccttaaacatcttcataaatgttctcatgtctacttcactaagaaaaacaaatttaaatgtgttagtttgtgtgagtactttatgttcttgctgtttttctgtgtgcttaggagacaatttaagcattgtttgttagttcctgaaggacaggtcggtaaagaaaaataatattcaacaatttagaaaacaagggcaaagaatttgatgatatgagaaaagtaagagtggtatcattgtgggcaatctgaaaatacaaccacatcagtgccaggccacatgccaaaggttgcttatggaaaagctgtttattaaaaacatgtattcgtgtgattcattcctgtgattcacaggagtcaacacacaattatactagatttaaagctggcagggtcacacatttgggagcaccacttgatcaatgaaaagaaaatacatctggatggtcgtattcctctagagctggcacttccaaatgggaaaccaatcaccaatgcttgacaatcaggatctaaatttacacttccatcattgattttacacagattagtttactgcttatataagtgactttgtgattgagcaccaagcagcatgctatttttccttcttcttctcctccttcttccctccttctctttgttctctttgccctctttcttcttcctcctcctctttttcctcttctgcctcttcttcctcctcctccttcttgttcgaagtatctgggaccaaagggtgagcagggtttaaagtctcaaaattgcaagtgaatctaaatatataggacttttagggtagtaggcaagtagatctaagaataataataaccccctcttaagctgttatattccctgtccaacagaacatgcacattccttctatatgcaagttctttctatttgccaaatgaaatattaccctgggctaccctgccaaagcacttatccaattaaaaaaaaatattttttgtgtagtcacgatgtttctactatgtgggagagtttggttgctttgataattctttttaaacagcagattsgtgggtttcataattaggattggttattttattgccataatcctagcttggcttttttcatgctttttgtttgttttgagacagtctcattctgtcacccaggctggaatgcagtgatgtggccatgtttcactgcagccttaacatcttgggctcaagtgatcttcctgcctcagcctcctgggtatctgggactacaggtgtgggacaccaatcctggctaattttttttttaaatagagactttatttaattgcccaggccagtcctgaactcctgagctcaagcaatcttccctcctcagccttccgaagtgctgggattataagtatgagccaccatgcccagccctagtttgttttttaattactctatgctactgtagtctaaaacagtgagcgctataggcaaatggcaaaaaaaaaaaaaaagattgctcttgagatatctagccatgttatatcctataaagcacggactgaactttgagcaatgcactacactgtgcttaaagactatgacaacttctctgcttcccgggagctcacagtttgaggggtgggggacataaaaatggtaacttcttttttttttaatttatttatttattattattatactttaagttgtagggtacatgtgcacaatgtgcaggttmgttacatatgcatacatgtgccatgctggtgtgctgcacccaccaactcatcatccagcactaggtatatctcccaatgctatccctcccccctccccccaccccacaacagtccccagagtgtgatattccccttcctgtgtccaagtgttctcattgttcaattcccacctatgagtgagaacatgcggtgtttggtttttttgtccttgcgatagtttgctgagaatgatagtttccagcttcatccatgtccctacaaaggacatgaactcatcattttttatggctgcatagtattccatggtgtatatgtgccacattttcttaatccagtctgtcattgttggacatttgggttggttccaagtctttgctattgtgaatagtgccacaataaacatacgtgtgcatgtgtctttatagcagcatgatttatagtcctttcggtatatacccagtaatgggatggctgggtcaaatggtatttctagttctagatccctgaggaatcgccacactgacttccacaatggttgaactagtttacagtcccaccaacagtgtaaaagtgttcctatttctccacatcctctccagcacctgttgtttcctgactttttaatgattgccattctaactggtgtgagatggtatctcattgtggttttgatttgcatttctctgatggccagtgatggtgagcattttttcatgtcataaatgctcttaatggctgcataaatgtcttcttttgagaagtgtctgttcatgtccttcgcccactttttgatggggttgtttgtttttttcttgtaaatttgtttgagttcattgtagattctggatattagccttttgtcagataagtaggttgcgaaaattttctcccattttgtaggttgcctgttcactctgatggtagtttcttttgctgtgcagaagctctttagtttaattagatcccatttgtcaattttggcttttgwtgccattgcttttggtgttttagacatgaagtccttgcccatgcctatgtcctgagtggtattgcctaggttttcttctagggtttttatggttttaggtctaacgtttaagtctttaatccatcttgaattgatttttgtataaggtgtaaggaagggatccagtttcagctttctacatatggctagccagttttcccagcaccatttattaaatagggaatcctttccccattgcttgtttttgtcaggtttgtcaaagatcagatagttgtagatatgcggcgttatttctaagggctctgttctgttccattgatctatatctctgttttgktaccagtaccatgctgttttggttactgtagccttgtagtatagtttgaagtgagatagtgtgatgcctccagctttgttcttttggcttaggattgacttgatgatgcgggctcttttttgttccatatgaactttaaagaagttttttccamttctgtgaagaaagtcattggtagctaaaaatggtaacgtctgcaggctgtaaatagtcaataatgaggcataacaggaagaaactagtctgaatgtcagaagacctaggttctaatccagactttgacactarctagctagttggcaaattgcacatactttctttggggttcaacatattcattacaaacctggaggaagggctagctagatcccttctagctcaataatttgggaactcttgaggggagaactagatatatcaatagaacatatagtttttataaggcacatgaagtcaccaactaggttggaacataatgcaagtcagtagtgcctggaataattaccaacataaaaataaataaatgaaaacaaaggtcttacacaggaaagcctcagaatctcagagggaccctgtgaagtcacattggtgttggacctgtctagtgcaaacagaattcagaggtggaaacaatcctgctatgaggaaggaagacactcctgttgttcaaccattcatatactagcgtgcattttgcttctctagactcattcattcatccattcatgcattcattcattcattttagagaaaccaagagactgttaccatggcagggaagcccaagcttcactacttcaatggayggggcagaatggagcccatccggtggctcttggctgcagctggagtggaggtatgttctaagttaggtcatcttaagttggacctaattgactgtatcaaaatattttagtaagccaagagacttccatactagatgacctgtgaatattttggcctcaaataaaagcatccccagttatttttttaaaatggacaaattttaccaaatgaaaatttaaaaatctgtccattaaagagcacatgaaaaagaacacatgaacaattaaaatatattttgaaaagaattaactaatcacaatgagtggaccttatttgcattaggatttaaacaaactataaaatataacttatgacacataaaaattagaaacctgaatattgattgaatgttagataatattaaagaattactgttaaattttttagtgtcattttgtgatgttaggtatgatgtttctgttatgtttcagagatacacactgaagtatttaggatgagataatatgatacctcagatttgtttcatattatgacagaggaggagagaagctgggcatacaaatgaaagacaggcttgggttggtgattactgcagctagatgattgaaacaaagaggaccattgtattttatgtgtattttttatatatatgagaaatttatacaataaaatgctaagtacatggaaactaaatgtcattaaacataaactataaaccacaatgaggtcagggagggartggattgtgacaaactgcctgttaaatactgagtatattcagccagtggttattttgttgtgcacctattaagtgccaggttctgtcctgaggattggcagtgaacaaggtagacacaattcctgccctaaggcagactacatacatgtctacaaggactcagataagaaaacacgtggttaaaatcaggggtgggggcttctagaacacccaggcattccccagtgttaccaggccatcctcccagtgtttgagcaggaaatgctgggaggtgtctgtgggactccgctaagtgctgccttctagaggtgtcactgagaaaaacacttcccagtccagaccagagtccctcagtaactaactgcctgagggttttcctccagagtaagtaatggaaaaactcagaagatcttgtccctcgggtgtcagcagaaaaggagggtttcaggtgaggtggcgtcctgtgaaaggaacttctagcgcgccccttcagcctcacagcgctgtgtggacctgaacctcggggcggcactttctccaatgcttcacgagggcttgggactcacctttctcaaacctatgaggaaataagcacacaagaaatccacacacttccattccaggttgttttctgtgtacaaatgaataccctgtttcattgtcacccagacatcagctctgcagctcagtgcctttcctccagtgacgttccctccctaatsatggacatttgtgagatcgtggggaggtgaagtaaaagacggagcaggccaggagcagtgggtcacacctttaatcccagcactttgggaggccgataggggaggattgcttgagcccaggagttcaagatgagtctaggcaacacagcgagaccccagcactacaaaatagaaataaaaaattagctggatgtgatggtgcatgcctatagtcccagctactcaggtggctgaggtgggagggtcacttgggcctggtagatcaaggctgcaatgagccatgatcataccactgtacttaagcctggrcgacaaagtgagactctgtctcaaaaaaataaataaataaataaaataaaaaagaagattgagcagttctgacccattgtcagacccatgagcatgagcatggtctgacccatgcctgtttcttgagggataaaatctaaatttccaagcggccatgaccagcttcttctgtgtcccctgccaaactcagaaatcttatgttctccaaattatgtaccagatggaggccattcaaggtcacaagtctgtaatgctatggaacgaactaacaagaacccatttactgtttctgcttccagtttgaagagaaatttataggatctgcagaagatttgggaaagttaagaaatggtaagatcaagtctctaagtgcctctgatgagggtatctagtagagaaggkaccgctgaagattgatttttttttttttttgacggagtctcgctgtgttgcccaggctggagtgcagtggcatgatctcggcttactgcaagctccgcctcccaggttcatgccattctcctgcctcagcctcccgagtagctgggactacaggcgccagacaccacaccaggctagttttttttttttttttgtatttttagtagagacggggtttcatcgtgttagccaggatggtctcgatctcctgacctcgtgatccgcccgcctcggcctcccaaagtgctgggattacaggtgtgagccaccgtgcccggccacagttgaagattttaacaccaggcgatgcctatgtgtgtgtggggtggtagctgtggtggtggagagggagaaggtggttaaagtggaagggatgtggctccctgaacaggtctggcaactatctccaggctaaaaggccagacctctcagagtatctgctagaggaaccatccccagtgccctgagaatgccctttccttgttttcatgcttggggcaccgtgaatgagctgwggtcatcagctcaggatcccacacagccttccccatccaaggacacacaagaacatgaataagacgaaaagaatagaaatagatgtggccattaccttgagttgttttctttcatgggtcatgtgataaggtcatattgtagtaatactgtaggcttggaagaacacagaaagggacctctgcataaaattgtgtctcagaacctactttaaaggccatgaacaccatgagacttaccctgagaagttctcattttaagtgacatctctctggcactcccgttgtaacctgtctcagctttttcctaaaatatcatgacgataaatcaacgcaagtaaaatacaagggacctactatgtacctggatggggaataaaaacataaatgaaataacaggctaaaaggtcaaaggaatcaggtcagaaaaagaactacaggcagctaaaatcaaaatactatttcgtttttgaggttagcaggcaataatttctttttcattttataacctcagtcatttcaaccatcatttttcttcctgaaatastgggattcatagaaatttcatgttccttttttttccttctttctaaagatgggagtttgatgttccagcaagtaccaatggttgagattgatgggatgaagttggtacagaccagagccmttctcaactacattgccagcaaatacaacctctacgggaaagacataaaggagagagccctgtacggtatattttgtgttcttccatccacagagaacacagagtgatttaggtccttccttgagtgggtgagaccatgacagggcatcatgaccaggagcaggctgggccttgggygtgtatactgaggtccagtattgcagagtcccatggggatgaggraacagtgaacgtgaggagggttcaggtgagtgtgattctagaagaggatgcattccatggatccagcaccctgacagaggtttccaaacactgatgaaccatgaactcaggaggatggggaataatgattccaggtgctcaagccttcagaggctggactccagccaacagcttaggrcaggcatagaatgtttgagagtctgtagatgaaggcctggggagggaagactgcaaagaagctgaatctcaggtcccagtaattccaagaatgatgcccaggaacccaagttaccagccaattatatggactggtcaacttgagcagggctagtagaggctggcacccagaactctggggttgcctggaaacatggattcaaggctgaagcagctagatttatcgaataccagcaaagccatggggtctcctcactgttgcaatagggctgcctgattctaaataacatcctatgtgaaactgttggcagttcttcaaaaagtttagtgtagagttaccaatgacccagcaattcctctactaggtatataccaaaagaatcaaaatacttccacaccaaatcttgtacataaacgtacagtgcaaataacggcaattttcatggtattcaaaacgtagaaataacccaaatatccatcaaccaataaatggaggaacaaagtgtgccttagccatgcaatggaacaatatttactcatgaaaagaaatgaagtactgatgcatgctacaagaaagttgaaccttaaagacatgttatgtaaaagaaattaggcacagaagtccacatattgtaggattgtgtgtatgaaatgtctagaatattcaaacccatagaggcagcaagtagactagtggttgcctgaagctaaaaggtttggggtttggggaaaatgaatactcaatgggtacagatgtccttatcagggtgataaaaatattctagaattagagtgtgatgatatttgcagaattctgtaaatgtactaaaagtgactgaatactataatttaatgggtgacaacgataatgtgtgactatacatcaatgaaactgttgttttaaaaagtactgtggaaaacctaattaaacacaaaagaaaaaaaggtttcctaaaatatgtcctggttgtaactgtgtatagaatttcaccaaggaaggggatcttttaggtggggtctcaagtaaggcacacatggctagagtygggcaatagcacatggatagggctgtagaattatgtttcatgggagtaattggaaaaactgctaatattgggcatagaagtgggcctgggagatgtaaatgatgagacaggacaaggaacatgactgagatggctgtgccagggactctcttgggattacttaggagaaaagtctttggccatttgactcacacgaagtttatgcacagaacaaaccacaatggagatgataaatcctggcacagcatcggtgggtactggcagtgattccaccaatttctctcatgactgtgactgtagacaggtcaccgatgctctttgtacctgtatttggtcatgtgcataacaaagattttagagatatatctacctcgataagttgttttaagaaataaaaggcagccaggcatggtggctcacccctatatcctagcactttgggaggccaaggcgggtggatcacgtgaggtcaggggtttgagaccagcctggccaacatggagaaatcctatctctactaaaaatacaaaaattatctgggcatattggcaggcgtctgtaatcccagctactctggaggctgaggcaggagaatcacttgaaccctggaggcgaaggtggcagtgagccaagattgtataacctcactctggcttgggagaatgagggaaactccatctcaaaaaaaaaaaaaaaagaaaaagaaagaaagaaggaaacgtcaacatacatgcaaaaatcagagcataatgactagaatataaaaggcacccaatggagatgaattaccttaccaccatctgaccctctattctcttaggtttttataaacctacaaaatctaaggcaagaggcatttgatgctttggctgtttttgtctttcagaattgatatgtatacagaaggtatggcagatttgaatgaaatgatccttcttctgcccttatgtcgacctgaggaaaaagatgccaagattgccttgatcaaagagaaaacaaaaagtcgctatttccctgccttcgaaaaagtaggtgaagctgttcagcattttggggcactgagtttagaggccagtagaaaaatagtggctgggcattcctggggcactgaccttcactttcagtgagacttcctgaacaccaattcrgctctctgactctcaaggcattttatgaaaattgacttagaggaacagtgataccacttatccccaagttataattttccagcaaaatttcaatttactagaccccagtataraattctctattcaacaattttatgttcataagtagaacatgggctgtggaaggctctgaaccacactagaggttgctgttgagtctgtggaacacaggctttgtctgaagatgaacatgatgaaagcgatccattagaaactattctggcaccatgtgtaggaagacaggagaccaatttcccaaccagagaatattgtagtgtttcagagatggatatttcttaaaaggatagtgacagtggggtggagaggaagattttttaaaactcattttaaagtaagttgcagacgtcagtgcagttcactcctagacacttcagcttgcagattataacagcgcaggttaggagtcagagccgatattgcaagaaagatgatgaattcaagttcaccctgttagataggagttctaaatttcttttcaaagaattaacatgtcagtatattcaattttttgccttctacttttaaacttaactacctcgtaaagcaatctttttcgattacctactccaccctgactcattccgatcacctgctccaccctaactcattccgatcacctgctccaccctgacccattccgattacctgctctaccctaactcattccgattacctgctctaccctgactcattctgattacctgctctacccaaactcattccgattaccttctcctcctaactcattccgattgccggctacctgctctgccctgactcctgccaaagcactcaccccgtcattctctttaaattagccaatcagaattagtttagccagtgcagtctaaccctagccaataggggaacgacacagcagcagggggaaagacacagcagcaggggccacgtgcgtcagggataagaaacccttcccctcctttgtccaagtgtgcgctcaccrttgttccatctgtgagagcgcacccttctatatagaagtaycttgccttgctgagaattaaaaagaaaattttatattcaagtactattctttttgcgtcactgaaactttatatataacaacccaggtttacttcagatcccagggagatagaacaggaaatgaggaaagcagacaaggcattttatgaagatagacttggaggaacaatgataccacttatacccaagttataattttccagcaaaatttcaatttactagaccccaatatagaattctctattcaacaaaattttatgtttttaagtagaacgtgggctgtggaaggctctgaatcacactagaggttgctgttgagtctatggaacatatggagaaatgaagactctgaaatagtctactcctggaggaagagtgctgtcatgaaggtggagtcactgcccaagggagattggagagkgagagagcagattgtagagccacatcctgaatgtcaaggctacacgctgtagggcctggggcagacagaacatgcagtagcaggtgctaaacccctggcccatgtggaaaatgcaagcaggtggatggtgtggatgccacagtgatgtggaatgagaagagaaaatgggagcctgagctccaactgaggagtgagcagagccacattcttgctccctcactcaatcagggaacataaacaaaggcctggaccttcacaccatccagttaggcaacacaggtgggaatgtcaggctggaaagactcagggagaagcaggggtcccatcctgggtgcgcatgtattcctgatctgattcctcaaattctccaggtgttacagagccatggacaagactaccttgttggcaacaagctgagccgggctgacattagcctggtggaacttctctactatgtggaagagcttgactccagccttatctccaacttccctctgctgaaggtgacccatttcacagccctcagagagacagccccacatgtcccatcttgggatctagtatctgggcccttggactggccatgttctgaccccagcctttttcagrccttcagtacccccaggtctccaaaatgagcttccagaccccaattttgaggcatgaaaagactcttgttctggaaaggaaatttgtggtcatgctaccccatgaaaagtattttgccttttatcacggaaaggacccagggcccagcatcttccttcctcccccattcctctgtggtctgttcctgagttctgtgattccctttatcccaagactgtccttgtgttcccacactgaattggtctgagcagggccctttccatctggttccttccttaggctctggccagggtgggcagcaggagctgtcagatagttgtgttcctctgtgcacagcacacccaacacactgcccccaaccctgtatctctcactgagaaaacgtggtcccatggtttgactttaatattttctataacattttcctttccaactcatttctccatattttcacttctgcttagagactgacctgtgttgatatctcacaggcacattattttttcttgtcttatacaagagtcactaatctacaggattgatatgtaaggagaaagatagggatgactgaattgattaaaactttaagacatctttgcggaaaataaagtgagctacrtgttcttcctcttatcttcatttatcactgggtgtctgtttctgcctccatgctggtgctgatggaggggactcacttggtctctggcaggaggggtcaaattccctgggtggtattaatggtggtggcagaccttggcttcactctgaggctgtgctttgtgaattacaggccctgaaaaccagaatcagcaacctgcccacggtgaagaagtttctacagcctggcagcccaaggaagcctcccgcagatgcaaaagctttagaagaagccagaaagattttcaggttttaataaagcagccatggaggctaagaacatgcaagaccaatattctaaagttttgcaacaatgaagtgctttacttaagtgttgattgtgcctgttgtaaagctaatgaaccctttccaattatatgctaattaaataataaaaactcctatttgctaacttagttaaaatttaagccttttcattaggatctgatatgaattcagatttctaatctcctcctaacctctttcttgaaattaaaaatttagtaaaaatgggaaatgtaggttatatggtttgacttttaccaagaattatcctgtaacatttgtcatacaatctattaaaatgtcaatgtagaaatgcgctcctgacattttcaggtatgcacaggagaagagttaccattctgggtaatggcataaagacattttcttcttttcctggacagtcattttgtttcagataaaagcgttctttctcctgtattttcaaaacaatgattctgtctgctgtggattcctcagttttctaggaggtgaggaaatattgaagagcaaacagacccaccctctgctctcaggccaccctgttgtcccttacagtgcatgtgctcctggctcatcctcactctgctccttaaggctctgtgggggccaccgtcatgaacattccctcagttccctcagtgccactcaggcctgggctgccaagatacagatggtatatttgaattacatataagtaactactatatgcaaaatcatttttccgtggtgtgtcattgtgccagagttcttagatgaggagtgctttctagctccacccacatactgggcctatagtgttaatctcccctcggacacctgggcttctgcaatttgagctctcctgttagaatgagcttccccacagttggcagaggtggttgagggagcagacagacacaggcttcctacctgcagcttcactttgctctagtctcttctccacttacaaccagcatagcttttctaaaatacaaattggaaaaaaaaatcacagaattctgcagtgagtcctgactgcatatagaaggtatcctcacacccgtcctcactccttgatctccagcccaatcaaccctctgagcatggtggagcctcttgccttcctgcctgggtgcatttgctagccctgcctggcaagctccttcccagtgatcacaattaaatctaccctattgcttctccggagcattgggctgtcctctgtgccctcctcagagccccagtgagcctctaagaacacctgagggccactgtgtctgctcccctgtgctgtgattacgggtatgggacacttacatgaactagaatgctgaagctttgatgaaactaaggaattatagaattttaatatgataagagaatagtgtgattatgtttcaacaggtagttcttcctttctagagataaacagtagtatgtacagaagaaatgatatgctgtctggaatttgtttcaaaaaaatcccttggtagtggggggagtagaagtttgtactgttttcttgtggcttctgtcacagattcctacaaacatggtggcttgaaacaatagaaattctgaaggccagaagtcaagttgtgaggtccacattcccctggaagctctagagaacaatcctttcctgcatcctacagcttctgggggctcttggcatttctggacttccttggatcttggccacatcactctactttctgcatggggcttccagcacctcaccctctttgtgtctgtgtcttctctgttgtgggtacacttctcactggatttagggcctatttaaatataccaggatggtctcatctcaagttccttaacttcatctgcaaagagcttttttccaaataaggtcacatttacaggatccaggggtttggatatggacctatcttctgtgggggccaacataacccactgcatggtgtagatgaagaaaggcttttgtcaatcggtgaatccaggtcatgggtactttcaacttagttatattattctgtctacttttgtatttgctagaattcttccatgtaaatttaaaaactatcttattttaggagctcctacaatgaccaggttttgtgccagacaatgaggactggaatcaaacaagaagaaggctttcccctcaggaactcagggtctagtggggaagctgatattgaatacatcatgtcaaaacagtgtagggaaagaagacatagtagagaaaataccatggtaggtgaaagtagtgcattccagtcaggacaattaccatgtgcaaaggcccagaggtcaagaagggcaacctgagtgacgcagagaggaaaaagtatgcaaatacggtggctagatttggcagataaaatacaagacacccaagtaaatatgaaattcagatgaacaatcaatactttttttgtataatcatgttacctacagtgcttgggacatacttatactaaaaagatattgattctttgcctgaactgcacattttcctgggttccctgcattttatgtggcaacccagtaatagaagctttccatagtgccatcagcctgcccttcacagacatcccctcccagctatgctcccagcagagatttctcatctgctttagtccttacatccaagtcatgaaaagtgagtgtcttcaaaaagccagtttctactgacttgtaaagagagcaaaatctgctgaaatattttgttaaacttttaatgccaaccttgaaaaggaacatattaaccagttaccctgtgataagaggatgacttgccatttttcttagaatctagtaggcagtcttgtggccctgaaacatgtgggggtggctttttgctaaattgactgtacctctttcaatgggaaggagctatggaaaggaccatgtagcttataaacgcattaggaccttaaattaagttgttgaaccacragcatgacagtctttaacaaactaagcagtgatcttgtaaatcttctcatactgcctcataccctctcatctaggtcactagaaaaatacttttaaatgtatccttaacacaataaaaacaaatctgtttaatactcacatcaatgccttctttgtgtgcttggatgacagtttgagttgtgcattcagctgcttttggatacatcgtgtcaactcaataaacagaaagagactctaaaataaaagatatttatttgggaataaagttttgtaatgggtatgcgtgtaccatattaaaccacgtatgtgcttagggagataaaggaagacaaaggttttttaagaaaaaaatgaaaagcattaaataaatttttaaaatacttataactcactacaaacatcaataacaagggtgacgtcaggccaagtatgaactggcagttgctggtcagatgtccttgcagaagttttttgtataatgttgtgataacctttgtgcaagtttatgttttttgtaactttttttcttatctgacataaaagaatgaaaaccttctcttcatggttttccagctccgtttgtcaaggttttctcaacattagtaacttcattttttttctgataacattcacaatcattacagaaatgtaaaaaggaagaatttataaaactagggcatgatatataataataggaaaaaagttaatgatctaaggtaaaaaaaaaaagtgatggtgccattttagataatctgagaatacgagcagtgccagaggaaacataggtgtttgtgccaaagttgttttctctagacaagtagtcaatatacaattgttgtgaatgaaaatttggcaagatcacagacttgggattcctgatgaccaatgaaagggacgtatatctgcacagttccatgtctgcagttgtttctccaaacctccatctcctgctgaggaaagagccaccaatacctagcaaacacaattctaatttacagcttgatggtagatatcacacacattcgtgcttccttcaggaagtgctttgtgatttgttgccaagtgttgatgccactgacttttcaatattactttaaggttgttatgctccaaagggcaggcaaaatcttttgtgagccactgtgtagaacttgcaggttaatctaagtctgtagaacttttagttttataaagcaagatgacctagatttatgataaaaaaattaagaacaagaatgcccttcttgtaaatttttacattcctgattcaatgattatttgttaatccttgtcctttgcccaattgaacatttgtctgaaaaccctgctctttccaaattcctccttccttactccttctttttcacttagtggaacagtctcatttctttattaattctgcttaaactgcagaaaattgagtctgataatcaggattggttgacccattgttgtgattctattatttaatttttctatgtaatttttttctatattatttaattttcacatcaagcaagctcaaaagtagaaattggagaaatctctgtgaccactaaaacgtatagcagcactattcctattagaataaattagtctctgaatgtcaggaaaactagaatctaatttagtctttgctactaattagctggatgacaagtcacattctctctctgggattcaaccaactcatgacaaacctagaaaatagctaagaaaaagtgtctcacccttagcaccccttgggttggggaattatttgtgtgcaggggctgccttgttcatgagagggcatttcaaggcatcactggcctctacctacctgatcttgtagcactacgtacccctaagctgtgaaaaccaaaaatgtctgcagacattgctgaatgggttaggggagtaaaatctctcctggttgagaatcacttgactacatgacttctcaaagtgttaaaagtcaaaagtcctgataggagaactacacagtcattcgagcatacaactagtttttaagaagcatctgactagaatgtatgatgtcattagagtataagagtcgacgatggcctggaataaatgtttaatattgaggggcgggagatgttataaaaggaagaccaggagtttcagtgagatcctctttttggatccagatctgagagctatgcaagctataaaagaattcacaggaaagaaatatagcagccatgtgagaagatactgaaatgagagttgcaagagattacagagagcaatgtttaaatacagatgagcgatcctactttgaagggtaggaaagcacacatttgggagtacaaaatccactgaacctgcagattgagatgctactgtggaaaaaaggagcccacctgggcagaagagacagggtcctcagctttttctgagtctggcagccttctccccttgctctgatttgcttggctaagagaattatgattcttgggttggaatttccaagaacccattaaagtgaagtcactgctgagcacattctgctctgttagttgtccacaagcctgtttttcttttttcttttctcttttttttcttttcttttctttctttctttcttttttttttttttttggtgacagagtcttgctctgtcacccagggtgcggtacagtggcatgatctaggctcactttaatctccacctcctggattcaagtgattctcccacttcaccctccctagtagctgggactacaggcacatgccaccatgccaggtaattttttttttttggcatttttggtagagatgaggtttcaccatgttgcccaggctggtctcgaactcctgggctcaagtgatcacctgtctcggcctctgaaagtgctgggattagaggcatgagccaccacacccggccccacaaggctatttttctgactagatttaaaccctttagagcgaggaccaaaacataccaaatattttttgctacaagccatcatcattgcttgagacaccgaaactgtttttaagaggcgaacactccagaaacaaggaattgaggaaggatcagcaaaatgtctgcattttcaggtaagtaacaggatggtgtagagaagtgactgttttcatcaagtgttaagagtgagaccctgcccaagagctatgaatggctggagagaggcagtggggctcccacatgcatggctggagttcatgcaaagggggcctggcaatagga

SEQ ID NO: 95007 - DNA, 20562 bp, Homo sapiens
ttcacagccctcagtcctctcccagaggaaagctgggcttgtgggcgggagcctcccttggtgcccacaggtcttattcttgccctgggtgctgcaggcccctccctaactctccctggccctggacgagcctttccaaacccaggcccctgctccctcggctgcgtccacctcctttgtctgtgtgaccactgtcccagggaccagaacctagagagcacaagcctgggggcagcctcccctctggaccatgagctcctggagcacagggacctccttggcctcccctccttctccctggcacctggcaggggcgctggcacagagcaagtgctcacagctgttagaacagagacagggagcactgccctcagggtaccctaccccttggagggcccgcaaggctcggtgtagcagaccccagccacaggcccttcggatggtcccgcctctgacttggcagggacgcagagctcacactgcccctgggcagagcactcaccttcctgaagacccaggttgtgcaagggccctccgcatgctgctccctgtcacgagaggaaaaaatcttgcaggcgctggggcttcccagaggtggggccccaccagggtgaggctctggcaaaaatggggcagtggcaaagcccagcagaggtgctgcaacttgttgggtcagagggagtcaccaggcgcttaggagaaaataaaacaaaagaggcagtttccttaggcactgggtaaaagcgaggcttctcttggctcttatcaattccctgctggtccccaggaacccggcccagccacagagggtcctcccttgtcctgcctgccacttgcacacaggtggcactcagcagacacgtatggaatgaatcaacaaacaactgactaaaggaagaacacccagggtcttttgttcccctaatcttagatagcacgtggggagaaattctcctgagctaatcactcgtatagcaaccacaaatgaccacttttcagcacagcctcgcttgctttcttttgttcccaatagcccacaggtgctactaaacccagtttcaacttgacaatattgaatggctttgtgagccaggaaccaggctagaaactgaacatatggagagaagaaaatcatggtcctgatttcaaagggagagttgcggggaggggaaggcaggatggaggcaggaaacaaaggtgcccacaccacgtgacccacgttacgatggcaggggcagggtctgtggaacatcagtggctcagggagctggagtggcaaaagaggctgggagggtgggcagggcaggcctcagagggtcctgggtgccaggctaaggtgtttggactttactctgtggacccagggccaccagtgaagggcttgaaacagacaagccaagtaggcagatggcaaagcttctgtccacgtgtcggatggcatgtctgaatactgactcggtacaggcttaatgggactctgacttctgcccactgaaaaagacaaggaagtgggaagcaaaataatgataaacatcactttccccatgaaaatgaactcctccaggccgggtgcggcggctcacacctgtaatcccaacactttgggaggctgagacgggcggatcatttgaggtcgggaatttgagaccagcctggccaacatggcgaaaacctgtctctactaaaaatacaaaaaattagccaggagtggtggtgcacgcctgtagtcccagctactcaggaggctgaggcataagaataacttgaacccaggaggcagaggctgcagtgagccaagattgtgccactgcaccactccagcctgggtgacagagtaagactgtgtctcaaaaaaaaaaaaaaaaaagtactcttccaaactctcagcctccagacaagggccccctcttctctgcaactgtgtgtgcccactgacctgcccccagggcccttctgggctccaggaggccctggcctagttcctatttggctcctttcccagcagcttcccagtgagccacaccagggctggggcaaggtagggccgtgatgtaacactttataaaacaaacatcctgggacttccacttacacatgggcgtcctctgcttccagcagatccttttggaggagctccacttttctgatgatgccaccattgctcagaggaaggaaggcctccctgaaagctgctttctatgcctcaggcacgccatttggattatgggcagagatggcacactttccaccttggagggtggattggatttttcggaaacacctaaaaccattcaaagggcaaggttaaaggactggtgagtgactgagctaaggaaaactatttttggccaaacatccagatgggactagagcatctgtgactagtccccattacccaggtgtcctgagttagggcacccttgccagggcagaagctaacctcccaaagtcctcatggggctggaggtcatgagcctcactccacagtccactcttctatgcttctggaagaagtttggtgaagtagagtacaaccacggacacgtaagcagcgcccaaacccattttccagaaagctctcaatgtcaaactttccaatactgagtaaatggatacacaaatgcttgctggttattgtcttctatgtgacctacttctttttgataagggtgaggccaggcgcggtggctcacgcctatcatcccagcactttgggaggccaaggcaggcagatcacttgaggtcaggagtttgagaccagcctggccaacatggtgaaaccccatctctactaaaaatagagaaatcagctggatgtggtggtgggcgcctggattcccagctactcaggaggctgaggcaggagaattgcttgaaactgggaggcagaggttgcagtgagccagtattgcgccactgcactccagcctgggcaacagagcaagcctcttgactcaaataataataataataatgataagggtgactgcttaagtctgcaatcactatatacctttataagccttttcatgtaagttagcaaagaagaaaaaagatacttccttcatcagacatgtttttggttttggtttagaaaacttggtcagtggatttatacagaactctgtgaaataagtagattcttagaacattagaaggaaagaagaacctgagctttcagccagtccaaccaccccattttcagaaaggtagtctggaacccagagagagagagtgatgtccaaactttcataatgagcggggcagagcggcgggggggtggtaagggggcccaaggaatcctaagaaaatgggagttggtcccagaacttaggtgagatgactaagctcttagaagcatgtccagtgtagtatctaatgtttttattcactcttttagcaccacacatagaagtctcatctctggccaggcacagtggctcacgcctgtcatcccagcactttgggaggccgaggtgggtggatcacttgaggtcaggagtttgagatcagcctagccaacatggcgaaaccccatctctactaaaaatgcaaaaattagctgggcacggtggtacatgcccgtaatcccagctactcaggaggccgaggcatgagaatcgcttgagcctgggaggcagaggttgcagtgagacgagatcacgtcactgcactccagcctgggcaacagagtgagactctcagaaaaaaaaaataaaaaagaaatctcatctccacatgagggtgattcctaagtgcgtggcatcacgtattttttttacaaagatctgttgcttgtttccgaagaaaagaaaatagtaatggagaggatgaagtttactgaaaatacattgaaagacaataaagtcatgcattttaagtaaggccaggtttagtcaccaccacctgagcttctggaatccagctgagtggttgggtttcacaactccagccttgctgtccacagttctgctgcccagggcctctgcgggtcttcctgcagccgcagagcagagctccggggaaggagcaggcctccttccctccttctatttcccctgctgggctctccaggcaagggctcaccttcccagcatgcgggcaggagtttgggctttggggtgggctggcgggagaggaaggtatgtgggcgatagcagtgtgagtggcttgtatgtgcaacagtcagagccctcctggctccctgagccaagaactggcctctacgttccagttaatgtttctatctgaccacccccaggctgctaggggaaccctacctgccaagacatccaggccctctgcctggaggctgcatactgggcagtgctgggaacgactggttgataggtgtgccgggaagctgggcgattctggcagtgcaggacacttccggagtgtgaggaaaattgcgtcattggaacaaagtgattcctcacagagaggcacaaagtccgcatcaccacagaatcaaagatgtctcattcagcgctggagctataacgttctctgatgggttttgatggttaatctcatcaagaattaagcttgttaagggtggagctaacccccctctccctccctctagtccggggaacacggtgcccggtgggcgctcaaggactatgtaaagataaagttgataggggcgtaccacccccacatcccttcacataggaagaagactcacttctgcttacggctagcgtttgctctgtttctgtggaagtcgtgcctgctccaggaagagctggatcatccattcattcatttatgcatgcattcattaaacaggtattcactgactgtgcctcagacctggttttgggtaccaaggaagtttttcaaaacctcacagggctttgtagctataaagatatgtaaggatccttgggttatctgaagcccagagaagggagataacttgtccaagagcacacagcaagttgggggcagcgctgggccagtgctctgagctcctccaaccccgcccccacccacccaaggctagatctagatctacccactcctctccttaactcttcatcggctgtactcccaccctaaggagtcgaaatccccaccctagggagagacatatcctgtctggattgtccaaaagggaatgaaaggtaaaaatgaaaaaaaaaaaaaaaagtgtccccaattcaagtgcagtgcctccctggtgcgggcattccagcgtggcctggagtgagtggcagtccacctccagaggcgtcccctgggcgctcctagggactcgaatttcccacgcggctttttgctttatgtattcactgtttagacgttttcggtcaaagcattttgggacttccgtaactctcagagcgcgccagggagccgcccttaaagatacctagttactgatgagttccatccggtaaagcagagggtagtgggcggcttggagactcaggatccgggtcccctcacgctcctggctgagtccctggcttcacaggggaaactacctccgcaggccaggacccatctagttacaggatacctcgatgttacaaagacgaggcttccagcgcgggggcgtggaggcggctgccagccctgcccgcagcgtgctggcgacccccgggacgccccttccctcccgcgcctctgctccctagctggtgggagcagagcggcaccgggatcacttccaggtcccttgcaccggaggaatgggcggcagcagggtccggagtcggcccggcggggcccacgtggccagcacatcggtcctccgctcgcgatttcccttttccgctctcgggcacgaggtactgaacgccaggtggaagcacagctgtgcagctacaggctctgccgttcagctgccgcgggccggggccggggcctgcggcgtcgtgcgcgtgcgcggaccagttccaggcgggcgagaccgccgcagggcggggcggggcgaggcggccgcagggcggggagggcggggagaggcggccgcagggcggggagggcggggcgcgaagccgggggcgggggccacgcgtggggcaggcggtgctcggctcggctgacgtcggcccgccggcgccccaccagctccgcgcgggcccgggttggccaccgccgggcccccgcccctcccccggccgtgtcccggccggaaccgatcgtggctggtttgagctggtgcgtctccatggcgacccgccggtgctataagtagggagcggcgtgccgtggggctttgtcagtccctcctgtagccgccgccgccgccgcccgccgcccctctgccagcagctccggcgccacctcgggccggcgtctccggcgggcgggagccaggcgctgacgggcgcggcgggggcggccgagcgctcctgcggctgcgactcaggctccggcgtctgcgcttccccatggggctggcctgcggcgcctgggcgctctgaggtgagggactccccggccgcggaggaagggagggagcgagggcgggagccggggckggctgcgggccccgggccccgggcacgtgtgcggcgcgcctcgccggcctgcrgagacacgtggtcgccgagcgggccacgaccttgaggcgccgcttcctcccggcccggggttctcccgcggctggataagggtgatccgggcgcctcgttctgcccccgtcttcacagctcggggctggaggggcctaggggagacccacccggagaccctgcggccccgcgccggcctctttcccaacccttcggcggccgcgcgctggccggggagccgttggggaggccctggcggccgcgcagcaggtgcaggggcgcagagccygggctcgccttggtacagacgagcgggccccggccttggcgccttcagtttccttccagtttttattttcgctgtgtctacagagcagatgacaccaatttggaaacccgcgagagtgggtagagctaagatagtcttgctgtagtagctgtgatattagatgctcggccatgacttagaggtgtttatttaaggactgtgaatgactcggtgatttcggaaaagcttggcttagatgaacggacatacacaggggagacagccctaaggtttgcagaaaaggctgattgtgctgtttgcgaagtcgaaataattggtgaaagtgtagaagrcagaacctctcaggaatgtctggggaggacaaagaatgtgttggctgactttgtttaaacataaaattgggcagactttaattgatttgtgaaatttttttcaaagtttgtttgaattagcccctatctcttctaacattatcstcttgtgctaattgattgaccaytttaaataacttagctgttacagaaaraccgaaaggtgttcttcagtaaaatatattcaagtaagttacttaagtaacgccttaaaagatacagaaaagcaaaaaagtattggcgtattaaaaagaaatcaaaackttccaagtttaggcctgaacattgccttaaaaatatttaataaggcctcaaatgacccagtccgagactgcatgagcctatttattattaaattgtaaatattcttcatataaacaaaaatatataaccatgtctgtaacaaaaatggttttgctagcgttgttactctcttcccttctccgaggggtgatttaggcaacttcggaggttgacaatgccaagcagtcacaatagatagagctttaaagcaaattctatgcatgggtttggatttatgacaggcccgtcaccctgggcctgtcatagtaccccatgccagagcaaactgtgtccccgaaccattgcctggcctctgtgcccgtaggctgctggcactgaagtgggttgcacagtggaaaagaagaaagctctacctggcagaaatttttaaaggttaaaataaataattttaagaaagctggttcacaaggtgccacatttgatgaaagcaaaatacagtggcttttattgttactagagtgatgttcttgcttgtttttcttttttggtgaagttagccccaaattattctcatagctaagcaaatacgagagtgactgtaaggacagttggcattcccggaattgctaaacttggtaggcaacgctggtttaagaatactgagttctagccgggcgtggtggctcacgcctgtaatcccaacactttgggaggctgaggcaggcggatcacctgaggtcgggagttggagaccagcctgactaacatggagaaacgccatctccactaaaaatataaaattagccaggccccgggtgtggtggcacatgccggtaatcccagctactcgggagactgaggcaggagaatcgcttgaacccaggaggcggaggttgaggtgagccgagatcatgccattgcactccagcctgggcaacaagagtaaaactctgtctcaaaaaaaaaaaaaaaaaatactgaattctgatcaggtaacagcaactgtaatacaatgtgataagttgacttgaagattacagtttttaagaagtatatacccagctaatacatgaaaattaactcgtaaaatctcaaatgctccagacatttccatgatgcctgttggtcagtaaaaatcattctaagacttagtggaagtaggaaatgtttgtatggctgtgtataaaggctataatgtaatcccagcactttggaagacygaggcgggtggatcacctggggtcaggagtttgagacccacctggacaacgtggtgaaatcctgtctctaccacaaaaattagccgggcatggtggcaggcgcctgtaatcccagctgctggggaggctgaggcaggagaatcgcttgaacccgggaggcagaggttgcagtgagccaagattgcaccgctgcactccagcctgggtgacagcgtgagactctgtctcaaaaaaaataaaaaagtctataatgctattttaagtttctaaggaactgaaactgctctgaaataaatcagaccattataagacttttttccatatcagtgagctaagtgcagataagcttctgaaacttgcatgctagatttttttggtacaaatatttgaaatgcttagtgtgctgccttggaaaaacctggtattttttgttgtgtccttatactgccaaggtttatggaatcatgtaccttatgcctagtaataattaggatgaccaggccagtgagtggttcatatccggggcatgattagctctgcgtgtgctcagccagtgccccatcttcaactcgatgtgttcctaaggtagacagcaaattccctattttatttctcagattgtcactgctgttccaagggcacacgcagagggatttggaattcctggagagttgcctttgtgagaagctggaaatakttctttcrrttccatctcttagttttccatgtaagtattcagtttacatttatgytgcaggttaatcttaagaattgtattgctaaggcttctaagtgaatttctccactctatttgcattttgttgcatttcagaggaacatcaaraaatcatgaacaactttggtaatgaagagtttgactgccacttcctcgatgaaggttttactgccaaggacattctggaccagaaaattaatgaagtttcttcttctgtaagtatatgaggcccatgctggcagtgcagctgagagtgccaggcaagtggaaaactttggcaaggtctaaggaagagcaatgaggcttacatgtcttgttatggaatgtagaaattaattcactggtggtaaattaatagtgataatggtgatactcatatcagtggctagactcaaaagagcaggattcattgtgactgatgggaatgaaggtcgctggctattggtgtggtgtgtggtgaggctgctagtgagtcacctgtgaccactcttgtttcaggatgataaggatgccttctatgtggcagacctgggagacattctaaagaaacatctgaggtggttaaaagctctccctcgtgtcacccccttttatgcagtcaaatgtaatgatagcaaagccatcgtgaagacccttgctgctaccgggacaggatttgactgtgctagcaaggtaagcgatagcagcaggcctcaaaagcgttgtataaaatgggcctggtattccccacgaggcagatacaagttgtgttttttgggcaataaatgctcactaaaggcaaatggggcgggggggtacatgacaacttcccatgcttttctgtttattccacgtgttaagccacatatggatagcatgacaccactcttctttttcagactgaaatacagttggtgcagagtctgggggtgcctccagagaggattatctatgcaaatccttgtaaacaagtatctcaaattaagtatgctgctaataatggagtccagatgatgacttttgatagtgaagttgagttgatgaaagttgccagagcacatcccaaagcaaagtgagttattcccccatctgagggcaagatcgggagcataagatatgtggattcttatcaaacaaacttaaatttctgattattatatttctatackttagtagaaagtagttgaaacccccattgagtcatgaagcctgggactcaaactacagaatatatcagcgacagtatttagaacaggattgtttttattttrattgtggctataagtgaacatctatcatgagacatttgctgcactttccttgcttgtaggttggttttgcggattgccactgatgattccaaagcagtctgtcgtctcagtgtgaaattcggtgccacgctcagaaccagcargctccttttggaacgggcgaaagagctaaatatcgatgttgttggtgtcaggtgagattttggtgggatagctagaggtcaagacattgaacagtttgagttttacaggctttctcctagtgtttgctattattttaagaaatactaagacacagtgtctcgtctctttattttaccccagcttccatgtaggaagcggctgtaccgatcctgagaccttcgtgcaggcaatctctgatgcccgctgtgtttttgacatgggggtgagtatacgtgaccctgttagggaagggcgggacacaactgacaataactagtcttaattctagagttaactttttatggcagttggttctgtattacatgggtttcagcctatctgctgcatacatttttgttattagctgtggatctggctgacttattttcttgattctaggctgaggttggtttcagcatgtatctgcttgatattggcggtggctttcctggatctgaggatgtgaaacttaaatttgaagaggtaatttagaacaaaactgtaatactcagtagccgttctaataaattcctttttggaatatttcaaaatttaagtgtcttaactaataccacaatgggctgaagtgtcttggtgtgatattttgagtgatttctttgtgctgtctgacattacacttgataccatttggttttctaaagtgtgaatcagctttccyagaagtcttggataattggttacattggaaatcatggctcacacctgtaatccagcacttggggaggccaaggtggtaggatcacttgagcccaggagtttgagaccagcctgggcaacacagtgagaccccatctctacaaaaaaaattttaaaattagcctggtgtggtggcgggcacctgtaatcccagctacttggaaggctgaggtgggaggatcacttgagcccaggaggttgaggctgcagtgagccatgatcatgccactgcactcagcctgggctacagagtgagaccctgtctcaaaaaaaaaaaagaaaaagcatgttgctgtgggcttcctagagaatatgctgactgtagcacatcrtcaccccaaatgtgctttgctagacctatgcttcctctccttaaaatacttgaaatgtttagtcacttaggaagttaagccattatattggtgcttgaatttataaaatayatccacatggtttgttaaaatcatgacgtaggcagaataggatttttatcctgttggcatgtatttgttaaaatgttttgacatcttgatgccttcctaggtagtagttagttgcgtactgttctttgataaaaatcatacccataacatcctaaaggagatagggtgcctggaggggaatgaaaacgagccacctgggatatgtagcctggttttcagggagatgttgatgtttttttgcttttgttactttaatgataaacctgtctgttgatgcctggtctcatgatgtcatgtcacaaggccctgtgatgttactcccccatgtgaatttcccacaatgaaggctgctctttcttttctgtttcactmtcttagatcaccggcgtaatcaacccagcgttggacaaatactttccgtcagactctrgagtgagaatcatagctgagcccggcagatactatgttgcatcagctttcacrcttgcagttaatatcattgccaagaaaattgtattaaaggaacagacgggctctgatggtatgtataaaggacgaatcacttcatgtataactgaaagctgatgcaaaaagtcattaagattgttgatctgcctttctagacgaagatgagtcgagtgagcagacctttatgtattatgtgaatgatggcgtctatggatcatttaattgcatactctatgaccacgcacatgtaaagccccttctgcaaaaggtaatttctgagcatactgtataaaacaattaagaggactggtcacaacacgtgtaattaagtagtacttcctctctccgtctctttatatagagacctaaaccagatgagaagtattattcatccagcatatggggaccaacatgtgatggcctcgatcggattgttgagcgctgtgacctgccygaaatgcatgtgggtgattggatgctctttgaaaacatgggcgcttacactgttgctgctgcctctacgttcaatggcttccagaggccgacgatctactatgtgatgtcagggcctgcgtggtaagtaagccatgcatgttgatggtgctgccaagaataggcaccttcttggatgtgtgcttcttgtctagacgaataagaaattgtcttgcctaagattaaatatatatggatatttttcctaagaaaagttttagaaaagactgatgagtgtatttctatgtaattggaatatatttaagttcatgccatgtgtcttgtggtttccttattaccaaaacggtgactgaagaaacgcttgctttagaaatacattgaattggccaggtgtgctggctcacacctgaaatcacaacacattgggaggccaaggcagaaggatcacttgagcccaggagttcgagcctgggcaacatagtgagaccctgtctctacaaaaaattaaaaaattagttggccatggtagtgggcgcctgtagtcccagctgcttggctaaggtgagaggtttgcttgagcctgggaggttgaggctgcggtgagctatgatagcaccattgtattccagcctgagtaacagagaaagaccctgtctcagaaaaaaaaaaaatacattgaattgtttcctgatgggaagtaaatactctcatgcccagttaggagtgagtcagggtttttaatatgccactttttctttctcaggcaactcatgcagcaattccagaacccygacttcccacccgaagtagaggaacaggatgccagcaccctgcctgtgtcttgtgcctgggagagtgggatgaaacgccacagagcagcctgtgcttcggctagtattaatgtgtagatagcactctggtagctgttaactgcaagtttagcttgaattaagggatttggggggaccatgtaacttaattactgctagttttgaaatgtctttgtaagagtagggtcgccatgatgcagccatatggaagactaggatatgggtcacacttatctgtgttcctatggaaactatttgaatatttgttttatatggatttttattcactcttcagacacgctactcaagagtgcccctcagctgctgaacaagcatttgtagcttgtacaatggcagaaygggccaaaagcttagtgttgtgacctgtttttaaaataaagtatcttgaaataattaggcattgggacgtttttatggtgtgttcattccagacagttcacgaatcccgtatagctcgctctgattctcagagaacaatgagtgggtccacccacacacaggtaggaggacaggtgagacggaagccccatcctcccatgtggacggtgcacatctgctcagcccaccccacatgtccagagttggctgcaaactccttgtccagagcctctggtggtgggacctacttaagtctgacggacctgtcctgtccaggccagtgcccagggaaggtgtgggaggccctttgagcctggcctgcagagaccatccgtgtcccctcccaccttcatgcctgtgagaagttaggaatgtatacggtaccacatttggcagtcagcttattttaataaattcagcaacagcaagtccctaccatgttgtgtatcttcaccatcttgtctgaccatgaccactggccttgtgtgttcttttactcaacgtgtacccccgctctcccccaaagtgtggcaggctctcatgctccttaacccccattgtggcaatgtcttacgggtaacgctggagctgcaggaggagggaaggacacgtcagagccaccaggcagtgggagcatcttggagtccccaccagcctcatgagggggacaggaagagagcaaatgtgtagggaggaaggctgtggctcctcccggggtgggaaggtcaagccgatgctgtcacccatttaccaaagctgaagagagtgacttcctttctcaaaagcatcaccttcccctgaaccctgagtccagagaagccaggagccctcatgtggctgccgagttagctcagggcttggcttatcaccaactctggtctccctgggccagggttgccaaaacatgaaagattttttcaggagccagaggttggttctgactggagggggagggcgggaaggagtgctgtagtccacagccctaccttccgggagcctgagaagtaggatgctggtgtgtttgggtaactctgagctccccaacaagggcagttccctgggatccgggacccactatgttaagagagttggcactgagtatgtactgtgtgccaagaaatttgagctagacaccaagcctagaatcttggtaaattaggtcttccatcttaaaaaggaagaaattcccgagatcgcttagtggcagtggtgagcttggactgaaaaggggggtattccactcaaaatcaactaaggctttggaaacaatgctctttcagccagttagggaaaatgtaatccaagaacggtcagtagtgccagtggggacagaaacagccgcaggtaatcccgtgctacacgtgagtggcccctgaaacctcgcttctgaccacagcttggcgtagccacttacaggccccaacaaagccagacttgggtctgtgaaatgatgtggccaggcttgatcaagtgatcttccttggcccttgtacatgggagcaggcaggcgaatttggcaggagagaccagagaacgaggacagccagacggtagccggggctgtgtcgacaccaggcaccgtcctccaggaggcttaagtcctgctttgcatttgggtatctccacgtcatttttaaagatggtgctgtctggtcgtgcacagatactgggcatttctagactcgtgacttgaagtgaatacagctccaccaagaccacttgtgaatttcttcctggcgtgctggcccccgggagaggggattcaggggaattgaactattgggcaaaggtaaaggcagccagagtgcattagaatcacttagggtgcttcttaaaaatactcattattgccccctgaccactttccccagactctggggatggagtagtgttggagcaactggagaaccatctggaagacataaaagtatccccaactcctgctccaaaatacattccagatagatgaaagttttaaatataacagattagaccataaacctactggaaacaaagtcaaaaggcaagggaccaacggctacaatgcccgtgaaaaggactaattttcttcatattaaaaacaacaaatcaataaagtaactatgcaatagaaagtgggcaaggcataaacttggctcacagtaaactttttttttttttggtaggcagagtctcactctcacccaggctggaatgcagtggcaccatctcagctcactgtaacctctgtctcccgggttcaaacgattcttctgcctcagccccctgagtagctaggactacaggtgcatgccaccacaccgggctaatttttgtatttgtagtagagacggtttcaccatgttggccaggctggccttgaactcctggtctcaagtgatccacccgtctctgcctcccaaagtgcagggattataagcatgagccaccacgcccagccaacagtaaactttttgaacatgaagacatttgtcaaccaaaggaaacacacagtaaaactatgagaatctatttctcacctatcagattggcaaagacaagagttccccagctcgcggggtgagcaggtgtgctcaagcactgggcggaaaagtaaattagagcaacagtctctttggagggaacttgataatatcaataatccacattatctttgacccagcagttctaagaatttctctgatgatactcttctaaaattattcattgtggcatcatttgtaaacaatctcttgtacacaagcaggtactgatgaaattgtcaatggaacgggatatacagtggttaaggaatgaagcagattcatcagtactgataaggaacaagctccaagctagattcagtgaggatagcaaagcaaggggcacgtgtagtatgctactgtgtgtgtaaaaagcaaaatcaaaccccaacaaactgtgtgtgtacatacatacttgcatatgcatggcatatttctggaagagcttgtaagaaacgggtaacagaggttgcctctaggcagaagaaccagaggcctgggccgagagtggggactggctccacactgcgcttttgatattggaatgtattactgactttacgaggattgtaaaataggtttcccgcgtgaagacataaactcagagatgaactcaagtcacgcagatagtgaggcagcattcaagccaggtcagaggaycccagcattcattcggtgtttccctaccctgggaacatgctgttaagcagctggagggtggcttgggcagtggactggctcagggggacatggtagagttgctcacgacctggtcctcacctttgcagggtccaggagggctggctcatgccaacccagctcatgaggccgacgaaggcagcagacccatcagaagccaaagatgggaacattcctggcacatcagcaggtggtcaacccctccctccccgacagtgtcagggccaggcactgcccctcacagatagcctgcagcaaccaagggcaggccagaagccggtgggcagagcaagccacgtgtgccccctgcggccctcttgagccctggctgatgcccactttgcactttctcgtgggtagggcctgccccttcccgggcctcactcggcttgtcttgtgaagtcatgtgctcgtcacaccccagcagtgacctctgctactgggaccacacatctcttcgcaggttccctccttactagattttcctaagtgactcgaagtggctggctagccccttccgcttagggggttttctggctgtcaccctgtaccctctttgacatgggccctcccccatgctggatctgggggtttgctttgcaccatctctgggcccggctggaaaactgcccctgaaggcaagagtcgacccatttcaaatcgggctctgtccccaccagggattcccgagaagcctcagtgcctgggggtgaggggggcaagtggggggctctgccttctccgcctcacccaatctcacccatcgggtttcaaggtaggacgtcatgtgaagcaaaggctttgcagagttctcccagttcttgttttttacagatgggatgaagcctagagaggccaagtgactcgtccaaggcgagtccgtaagttagaaggagggcctgggtgtcctcagggccctgcctcgccagccagcttctgctcctgggctcttgctgaacaatgaccatgactagaatgcggcatccttctctcaccaagggcaacgtgttcccggcccctgctctctgccaatcctattccctgccagggtggcagaggcagccccgagcacccatggctcyggaataccacagacggtggcacctggccctgcattcctgctgtggcttcagcttcggctggagctggacagacgaagctggacccaggccccacacctcactaggcactagccagacccaggccctatgcctcactaggcacaggggtccccacggccgcctccttctgagtgggggttgagctggtgccccccacccacggcagggcagctacaagggaggattggtgaaggcccgaatgcagggcacagagtggaagcgcctccggaattcttgctgctgttgggagttcggagaattttatccacatgcagcactgactccaggctggagagggctgtgaccaggcgtgctctgccactggccaggggttacctaggtggagctcagtcaggtgacttgtggagctcaggcccgtgagcttgtgagctggggagcgggggtctccaggctgggccagctcgggggtggctccgcaggggaggagacctggtgccctgctgggcgagggtcagtctgggcctgggtggttccgccaggagggtcatgcacctggccctgggggtgcctgtcagaaggcctggcccttccagcttctcacccgccccagggctgtgcaggccccactccctggcttctcaaggagggttgccagacttagcacaaagataagatactgcacgggacatatgtcagctgcaaaattgcttctcgttgatctgaaattcaagtgtaactgggtgccctgtattgtatctggcattcctatctggcaataaggcctctggtcctgggtaccgggagcctggcctcagcttttgtgtgccgtttggcccaccacaagtcaggggctcctctgggcctcagcatcctcctctgtcatcaaatgccgcccaggacagaaagcttttctcgaaagcaggcccagctggaacccgcacacccaagccctggatggccctcctagctatggacaccagggggcagcagcaccccgcggtggcagcgcggtcggggccaggaaaaggcggtcaaatcactcgaccactgggcaaacactgatagctccactatcgcagggggcccttgacagccacagggctgtgagactggagcgtggcctcgatccagagctcccgactcagccactccagggtcccgggggctttgaggaaggggcaccaggcagcccagtccccgaccagaccactcccctgacccccaaaacacttcctgaggccccccaggtgaagcccccagcccagcccctgcacccctgccccatgttgtagaaccagccctgtgtacagctggtggggccctgcagccttggtcctgcctgtccccctgcccgtccccgaagtggccccaatcccctctgaggtgttcccaatcctcccctgtgcccaccagcgactggtgaccccacccggcctcccctgaccaccccccatgataggctgagtgggcggagggcagatctccccccgccacccctcctgtggggctggtgcctggcacctgtccctgagccagaggcagagcccacctgaggctgcctgtgccgccctccccatcccccacacactaccacacatgcaaacacaccacacacatccacagcgcacactaagaccacatgccccagcctcacacacaccccacaagacacccgcacacatggctcccatgctctgccatccctgccagggtgcctgaccctaaccctggggcccccaccttcggaggtccccaggaacctggaggtcaggtcctgcccctgaggacccttgccattcccctcaaggccctgcagcccctccctctgcccctggttccctgaccacatggtttacagatgaagacacagcgcttgtccagtgccaggcggctcattcgaggtggagctgggacttggcctgggtctcagtgtgtgtccagggcataagctcatgcggttccagctgcgtgaagacagagcagagccacctgctgaccctcccttcattcattcatccccactcattcctgagcagcctcgcagggcttcagggtggagacgaccagagtaatttgatgaggtcaccgaaggcgacctctggagga

SEQ ID NO: 95008 - DNA, 31914 bp, Homo sapiens
cattccccaaataaactcctctcttggggtctgcttctgggagactctaacctaagacagctgcatatacagttaattctcattattcatgataattagattttctaaagtcatagcaaacactgaataagtcaatagtgaaccattgtttctagaggtaatccaggattaggttcctttgagtctctggttacattttcatcataagcttatccgatgtgtttctatggaaagacacatcatttaaagtacatatatatgtatatagttgattcaataatactgaatttgctaacagcattataaactcaggcctgaaggaagtctagctcacattttctccatgaggcacatcacagccttattgcttttacactagatagcaattcagcattatgcttgcaggccattttaaacagcaaatcaccaaaaaaagcacaaaaatatgaaaatatgtagcattaagtaaaccccataaggacatttatttacagtatgacagttgaaataagaaggcagaaggtcaccttgtttgacctcagctgtgaatatgtgcttcgggcaaatcaaattttccaacactccagacatgttgcaaatgccccatgagtattgatttaaagtttacaaataggccgggtgcagtggctcacacctgtaatttcagcactttgggaggccaaggcaggtggatcacctgacgtcaggarttcaagaccagcctggccaacatggtgaaaccctgtctttactaaaaatgcaaaaaaattagacaggcatggtggtgcatgcctgtagtgtcaactactctggaggctgaggctagagaatcacttgaaccctgaagctagagaatcacttgaacccaggaggtggaggctacagtgagctgagatcatgccaccgcactccagcctgggagagagagcaagactccatctcaaaaaaataaataaataaataaataaataaaaataaagtttacaaataaattttagcaagtaggcaaactctcaaatacacaaactacgaaaaataaggattgactatgtttttctaatcttatttaaagtcaagctgctgatttatggatggaattttaaatttacttctttcttgtgcagaacagagaaggcaggagcacctttgctgagtcaataaggataccacctgcctacgaaccacggatgccattcttgaacattcttctcagcccttaaatgcatgtaaattatatgacattgtgttgaatacatataattgtctttgtggctctctgtggttaactaaattgtaggtattgttcttgttcttatgtattcattaggacaggtaaattaatttaagctgtggtgtaaacaagaaaaaatggaatgacttcagaaaagcagccatttcttacacagtgtatctatcagttccaatcattttcagagggagagtcctccaaaaataattttttttttttttttttgctacagaaggatagttgaaaagtatcctcaaatacaaggtcaggttaatgcttgtgcaacatacagaaagagtggataaaagagccttggatgaatgaacaaatcacgcaggtgtaaagcacttagacagaggtgataacatgagccaaatgtttacttttgaaatgactttcttctctaaattataacgatgggaaataagaaaaacaccccaaagcaggtaatattccagcatactatttttaatatctctgacatataagattgtgtaggaaggcaatacaaagcctagctaggaagaagaaaagaggattaattttgtaaaggagacataataatgccacaggtttaatttatctcaagcaatgtcatccagctaaagcaggaaacaattatgatacagaacgttgaacgtggactaatcattttaatgactaatggaaaaagctataatagatttttcacccagaaatttatagagttaagtaacaccacagttgccttcgtaccactctccccagttcatttcggcacaggaacttggcaacagtcaaagtcctctgcctttagctaccactcactgaaaaagcaacatttcaaaccacaaaaacactcatgttaacaccttctgacaacttaatgaaaaggtagcaactgactcacaacttattatcaaatgtggaaaagcacgctctagaaggaaactttcaacagctcatccatcatccaacaaaccttcacagagtacagtattttctgtcaagcagtgtgtccagaaatgagaaaggggttgaatacagggtagaattcttcccaggatatgccccttgtaataaaatagattactaatcagatataaaacacagtgacataggggccagaagaaagaaacgcccaggagactgtaggaactcaggacaggactaaccagtgggtgggtcagaggagattcctggatatgccaatgcctggaatgagagaacctggaaactcagagaaactgagcatcccaagttcacctgaaatgggaagttaacatgtggggctggaaagaggtgcctgagaaggtaggcaagggcaaatcttgtgggccttatttgccagtgctaagcagcttgggtttgtttaacaggcaaaggggactcactaagagattttcagccaaggggagagatcggggagaatcgtgtggagtgtaagatttaaaatttagggagaccagcctggaagcagggagagaatggattgcagaggtaactgaattagcaaaactgggaagtggctgctacaggaatccaggtaacagtaatctcaaaatcaatgagagcatgaattaagacgatgcagagggatgtgagatgagggggaaaattaaaaaaatatatttaggagacagaatcactagtatttgatgaatgatagatgtgaggtgtcagtgaggtaagggaatcaaagactcttccaggtttctagcttgcactgttaattgggacagtgtatcagaattgttcctcaagactgaatgtgacagactctgtacatgctgtaacaacagtatctgatgatgtaaatattggaaataaaaattatcatgactgacagagtcatcatgtaacattctactctgatataatctattctatgatcttaaaaaagaaacattcacactaccactgagcacaacactgtgaagtcgatatgctgaccccaaagattcattatagccggagacaacacttcctgtgcacctgctaagagagtctgagattctctcaacccaaagaacatcaacggccctcccaggcagcatcagtcccctgcaatcaataagacaggatctaaccagactggaggaccccctccccaagattttcataagctccaggggaagctggttatataacagggtgaagattagagctttagagaggtcttgactgagtttctgcctttcctactcttatccagaaccattacaccctgaagatatatctggagtccaggatttcactgagaactggatagctgggcatgccaattgtatcttcaatggctctctgcttgctctcagcacggaatccaaactccttagcacagatacaatgatcttcaagctcaggtggagaatctaccaaaatcacaatggttcccttttgctgcaactggccctcccacccacagggccatggcagccatgtttacaaggcatggtctggacacctcttaacagtttagtaaaccaaatacggacccaagatgaccctctttaggatctaggaatctaaatgtctgtctctttaaccaggaatgtctgtctctttaaccatctcctttctctcaaatgctggatataatggggctttagtaaatgacagctggtagatatgcaaatgatttctccaataggaaaaacattcctcccgaggttatggttttattgctctatgggatattaaccagttttgtttctaactttgcaatctattccagcattctttttttaacattgactatattaaactagtcttttaacttcttctttagcaccctgttggttccctaattaatgagctaagtaaatctttgacacatgctctttctatatttttaaaattatagtttgaaaaagataagctaatttcccacaccccactcttttctgtggtaggtataagcctgagagtagtttgcttgcattgcaaaaggtttcactatcaaaatatgcttaccagtatgagatttaaaaaatatttccatgacagctgtttcatcttctggaaatgaatgagtcttgtattatctgcaatatctgattactgcatttccattacctctgaggttatctaacagccttggagagagtcaaggtctctgagagaggcagctcagcctaccaactaccactttgtaatatatggagaggccaggtgtggtggctcacacctgtaatcccaacactgggaggccgaagcgggtggatcacctgaaatcaggagtttgagaccagtctgaccaacaaggtgaaaccccatctctactaaatacaaaaaattagccgggcctggtggcgcatgcttgtaatcccagctactcgggagcccgagacaggagaatcacttgaacccaggaggtggaggttgcagtgagccgagattgtgccagtgcactccagcctacgcaacaagacggaaactccatctcaaaaaaaaaaaaaatctctttgggataagcccaaattgttctatttgacttttggtgttgccccatctacactattacccagatctacctgatgaaacttaatgataaagttacttgagacttggactctgcccacctgcaagcctcctgtctttggggaattcacctgattaatctttctgggtctcagtttccacatcagctcaacagggcaatatgctcaacagggcaatttccacatcagctcaacagggcaatatcattttccttacagggttgtccaaagacttacaattagcctggctcactataggtagtccacaggtgtcagctacataaatctaaaactcctaggcatgcttggatgggacaacttgggcacagaatttagaggggtggttttgtttcgttttgttctgttttgttttttggttctctgggaactggacaaggtgacacagccaaggcccttccaactcttaagaattcttccccaaagaaaatactttgcaaatgcctcagcagaactcaaaaatatccacaaactcttcactgacactaaaaacttgggtactccaaaaatcacttctgacccccaggcgtcctaccaggtctgcaaaccttcgatttggggatgcatgacctagcagcttttaagcatacgccctcaattgttaccccacctcccggctcagggctggccctcgggatgcagcgacccctcctcgccaggctccgcgggactccgggcagggcgctcagtgctccggcagccacagggttcgcagagctgaggtccgcccgagagagcagccgcgcctccagctcgcagttactcggagccaggccggggagcatctgtgccccgccccacgcgccgcgcaagtcctcccgggatcaccctccccgcgccgcgaaccccccgcacttcctccactcccgggtgatacccggcctcgctccggccccgcccccgcatctgagccccgactcctaaccgcctagagctcccgccccgcccacgcaccgacccccccggccccacccccgagcccccgcagccccagaggaggccacgggctagcgatggcgaatgcggcgtggctacgctctcagcctggccccgccccaaccctggccccgcccatgccccaggctcctgcctgggctctgctctcggccccgccccgcacccaagccccggccccacccccgagcccccgcagcccgggagcctaggccccgcccccgagtcccggctccacccccgagacccggccccacccccgagcccccgcagaccgagctaggccccgcccccgagacccggccccacccccgagcccccgcagccctagagccgcccaagggatggcgatggcgtacttggcttggagactggcgcggcgttcgtgtccgaggtaagcttggagtcccggccgttcggcccatggtcgcccgcaggataccgctgtccaggcgaaggtcgccgccgttggaagaccctccttccctattgtctaggtggcaacaggattttgctttgctggttttccggtgaggtagtgctaaaaagtgacgacctcacgcgcgccctcctgcaccgctgggcccggagtggtcaggatgggcgcgtcgggaggtcagggctatggttccctgtcagcagtccccaaggtctccgcctgcctccgcgcacgctcccatcctcctggggccggactccgggcgggtgagccgccccagctgagcacccgggcctgcacttcccagccgggctgcttctggggtgcaaagcgtcgcttgctaaaagcgaggtaaacrcaagccgttatcactcgtgtggacttaacactctgcttcttggagaacacgtatgctataaagtgaaatggccgggtacagagtaacggctaagaagcacgctgcacctccctggggtcccgggaacccgcacgaatctgtgcatagggaacaaaaccgaaacacggtggtggccttgaagtggtagaattatgagtgattttcccgactttatgtattttcttaaatggtcgtgtttttgctatktgtttttaaaactcacgctttatttaaaaataaatttgttccacattttgtggaaacttgtacatttcggctttctgtggatattttaaatttttctttcgttttctacgtggaatttgccatataagatgcagtttttccctttacagaaaatcattttaatgtaaaacttactctaggctgatcttactgaatcagttactaatagtccaaagtttgaacctagagttcattgcaccattttcgagttacataattgtgtttgtgtgttaggtttgggctttgtaacctgtattattttaatcatcttttttgccattaactctaytattcagtgtcatcgtcgtgaactccatttttagcttgtggcctgagtcctgtgcattcaagtttgccaccccacccccgctcactatgtgtgcttaaaaacgtgctgatcacccccgcggtggttgctgtttctgctctgttcctggctggctggttaaacatacccatagaaaggggcacgcctgctgagcccccttcactgactcccttccactgcaggtagattccctcccatctgctgagaaggctgtggctctatctggaatgcyagcaactgctcgtgtgttcttttgaatatttcttgtatgttcacatccattctcccctccttccacctgtgtgtatgttggaacaccagcttcgccagcaaagaggcaagaattgacctgatatagcttatggcttatcagtgagtgcagaggctgtttcaggactttgggacacttcactaaattctgtgcactttagccttttggtttcctgctgtccactgtcttgcatgcacttcacttcttgcctttggcaaaatttacatggtcattcctgttctggctgcttttatctttagttgcttacagatacctccctggatggttacttttccttttatttaaagttactactgttagcttctgtattgacttattatcttggaatccttacagccaattatttgcagccagtttgctgaggcaagtataaagaaaatatctatagacaaacatggcattttgktatgtataggctgggaacaattagaaatcaggctgcagaaatgtgagggttgggaacaaatagaaatcagtctgcctrattgtagttctctgcaggtcactagtttcccggtagttcagctgcacatgaatagaacagcaatgagagccagtcagaaggactttgaaaattcaatraatcaagtgaaactcttgaaaaaggatccaggaaacgaagtgaagctaaaactctacgcgctatataagcaggtaaatgcctacggtcsaacgttatttaaagaattttgggcaaatgacttcttaaataaatacactgtgtgtttactaaaatgtggccttaacattttggtttgtcttgctccctcttctctgaagagtgtgtgtgtgtatatatatatatgccagttttttatattagaccttgaaatactattaaggcacaaagtgcctcagtgtcacacgagtaaaagagacttacgagatayaatattcacatttgtagaccttacttagctcttgattagaataaatcaactgaaaaaggtatttttaagacaattggggaagttttgagtaaggacagagtgttagaagatacctagaaatcatcgttaatggtgtcaaggttatataagaaaatgttgatatttttaagaaaagtgtactaaggatataggggtgaaatagcatggatagttgaagttctctaagcacaaaaagaaaaggatagatgaggccaggcatggtggctcacgcctgtaatcccagcactttgggaggctgaggcgggcagatcccttaaggtcaggagtttgagaccagcctggccaacatggtgaaacctcatctctactaaaaactcaaaaatgagctggactggtggcgcacacctgtaatcccagctacttgggaagctgaggcaggagaatcgtttgaacctgtgaggtgcaggttgcaatgagccaagattgcgccactgcactccagcctgagtgacagagygagactctgtccaaaaacgaaagaaaataaagagagagagagatgaagcaagtaaggcagtttgataattgttgaacctggatgatgggtattgggaattcattatagtattctactttggtatgtttggaaatttttataacaaaatttaaaaactaaagctcttaagtttcaatgccaaagacttccctggcatgtctgcctctctgggctcctgtgttatctatttttctgtcctatgatgggtatgagcttctctttcatatgsgtgtgtatagtaaaaaatttaaccttgccccagaagaggtgtggctttgccctcagcttctgggaagtgaatctctaatgactggtaggagtctttatttgcctggattgtcttaacgatgtgatttagggtgggggcttcaggttatacagtcatgcacaggtgatggagccctgttaaaaactctggacaccgagactggatgagctgagcatctctggttggcaggactccctgtgtactgtcacatcaattctggtagaggtgccctatgctgactccatggggaaaggacaatggaaactccacatttgctactgccccagactccatcctgtgtgtgtcctcccttggatgattctaatctctatcctttcccttaataaactattaattgtgcgtttaacagcttgcagtgagttctgggtgtctttctagcaaattgttgcacttgagggtggtcctgggtgccctccagccttgcaattggtgttagcattgaggacagtcaggagacaaaggcaagcccttatcctgtggactgtgttccctctaacttctaggttggccaactcttgccagatgacactatctctgtctaaagaaattcataacctcctttactgcctttttcttttttcttttttcttttgtttttattttgtttttttgagacagagttttgctctgtcacgcagggtagagtgcagcggcaccatctcagctcactgcaacctctgcctcccaggttcaggcaatccttctgcctcagcctcccaagcagctggaattacaggaacctgccaccatgcctggctaatttttgtatttttagtagagatggggttttaccatattggtcaggctggtctcgaactcctgacctcaggtgatccacccacctcagcctcccaaagtgctgagattacaggtgtgagccaccacacctggcttgtttttcaaagactctttcttctttcctctctaactgtattataaaattttaaaaattttaactggaattttaaattgctatttctgaaaagtagctgagtgggatattttattcatctcaaaacacccactccacctagcctcaaaaataaaatttaattcctttttgctttttacttacatgttcttcagttaggtttcctaagaaccagtagctctgatagccccaccctagcccctcagctacagttttgttacccaggtaccaaaagtccaccactgaattagtggtgtttttttttgtaccttcagatgggcttttggaatatgctgtgggttttcaagtatttgttgactagttccttgtaaagattgtttgcttgaatattttgattgtttgtggaaaatgtgattaccaatataaaactaatgaaccattagatttttttagaaaatacttccccaaaacctttatcctgcattattttcatagacaggcagttataatttatttccagtcttttttctgtttgtgcatttttggcaacaacatcaaagagactggaggggaaaattcagatcaatttacataccctgtgaaaggatttgggggaggcattcatgtacttacagattttatggatcttaaatatttaggggtctagtttacatggacatttgaacatattgcccctctccttttcacaggccactgaaggaccttgtaacatgcccaaaccaggtgtatttgacttgatcaacaaggccaaatgggacgcatggaatgcccttggcagcctgcccaaggtgagtttactagttactgtgcttttatttgctgtacttctaaagaagtttgtgcttctcattaagccattgtaaatggagtcttcaagatcttgatgtgcttctattctttcttcattgcaaggtgttagttattagtatagtaactttctcaaagtgcttattcattgaccatgggctgaggttgtttgtcatcgtccgttcaggaagctgccaggcagaactatgtggatttggtgtccagtttgagtccttcattggaatcctctagtcaggtggagcctggaacagacaggaaatcaactgggtttgaaactctggtggtgacctccgaagatggcatcacaaagatcatgttcaaccggcccaaaaagaaaaatgccataaacactgaggtaatgttacctgcccacggagtttgtcctgttttactttcttcttctatgtgtttcacacaaaagctgtagagtttcagcatcattcctattttaagatatctcttgtttgatttgtgcaggaaggttggtaattgtggctacttcatacaacagagttgagcattcattgtttagagtttgtgaatttcaggtaggttctgatatacccagaaggcactgtgattttcctaataatggaagcagaaataaatgaatataaatgaaacatgttgctatgagagaatttgcayagaagccatctaaggttggtgtagactgctcccagaagtatcttcatgtcacttagacatgaaagtaagtctttctgcttgcacgggggcttcattttttataagtatagggagaaaggagagaaggacttcatcttaaacaaattatcacccagctccgctttaaagtagctgcttcactcggtaacgttagtctttgaatctctcactgaactagaatgataataaaataactaccttagccccttcttcttgaaaaaaattatagggaattaattggatgcttggtgctcaactgggactaaaatttcagaggactatgaccattgggtcaataacctccattgtggcagaaagagcatactcactttaaaatcatcttcagaatttcatgaagtaggatatgtgtcattcaactaataaagcatttaatgctcaaactttatttccactttcccctgactcatttctctacaactataataataatagctactctgtacagagtgtctaatgagtgccagcactctccacacagaagtttatttaattctcacagggagcctactgttatcattacttaacaataaaataattagattaagaagtaacttactcaagttcacataacaaataagcagcaaaacctaaattgaaaccctgatagccagtcgtggtggctcacccctgtaatcccagcactttgggaggccaaggtgggcagatcacttgaggtcaggagttcaagaccagcctggccaacatggtgaaactccatctctactaaagatacaaaaaattagctgggcatggtggtgcgcacctatagtcccagctactcaggaggctggggcaggagaatcttttgaaccggggaggtggaggttgagccaagatcatgctattgcactctagcctgggcctcgcaatgagactccatctcaaaaaagaaggaaggaaggaagggaggaagggagggagggagggagaaaccctgataatccatctcttaatcctggtctcaccagttggaaggaaggaaccctgataatccatctcctaatcctggtctcaccagtcgccctgctgtgtggtgttatcataactataataatgatagaatgagttccttatcacttccctcaggagaaatgcttaaacgcttattcatgtacagtcatcccttggtatccgatggggattggttccaggacctccgtgtggacaacaaaatccgcggaacctgaagtcccccataaaaaggcataatatttgcatataacctctatatacactcccatatactttaaatcatctctagagttattataatactgaatacaatgtaaatgctatattaaattgttgttatactgtattgtttagggactaatgataagagaaaaagcctgtacatgttcagtatagatacagaattcttttccaggtatttttgatctgtgattggttgtccatggatgtggaacccgtggatacggagggcaggctgttttatgtaaagtccatgtgtcttttccagtatatttgtatctataagtatcagccctcttcctcatttctttcccacactgaaatctcatctaaggttgaaattgcacctgttttaaatgcattaaaagctatatagctgcttgtccaagattttcagaaatgttgctgatttaaaattttgagccaccttccttgaataccattacagtgtcttgaaaattccagccttttggcagtcactaacacttcccagactgccaggggcttccttgaggtcacaacagagacgttgctttgtagaaagttttctctgaccacctcccactctgcccacactagataagcctcagcacctcctctgagttccctgctactttgtactttccaaccccctcctcatttgaacatgttaattccaaattgaacatgttaagtcctctgttaattccaaaagctcaaggactatttctttcttggtcccttttggaaaaaaagtggtttatagcctgcagctcctgccatagcaccaggtacataatatgcaccaggtaactgtgaaaggaataaaaattccttcagttatgttggtccacctttttggttataaaatacaaccaaaataaatgttaggcactttgctgagagcaagcttgcagcctgacatttgttgagtccattgattgatgattcctgtgttcagagttcttttcttttccttgtcttcccattacacagatgtatcatgaaattatgcgtgcacttaaagctgccagcaaggatgactcaatcatcactgttttaacaggtaagacattttctcaggcatcctaattaaatttctattttgaggggcctcttaatagataggaaattgagttaaaaagctctaagacctggaggccgaggcaggtggctcccgaggtcaggagtttgagatgagcctgattaacatggtgaaaccccatctctgctaaaaatataaaaattagccgggcatggtggcacacacctgtaatcccagctactcaggaggctgaggcaggagaatcacttgaacctggaaggcaaagkttgcagtgacccgaggtcgcgccactgcactccagcttgggtaacagagtgagactctgtctcaaaaaaaaaaaaaaaaaaaaaaaaaaggctctaagatcttttcyagtactgtcatactctgatttataaatatacaaaaaatgtttaaaaaaacacagatacccactccttcgcaattacccaacatcaattaagacacatatgtccaccaaaagacttttacaggagcagacatggtaacctgatttataacggccaaaaccagaaaacaaatgttcaaaaacacatggatgaataaacaaattgttgactatttgtacaatggaatactcagctataaaatggaataaatgatatacacaagaatgtggatgcatctttaaaacacagttcagcaaaataaagacaggagtgtacatactgtatgagtccatttgtagaaagttctacagtagacaaaagttcttctctrtggaaattgaagtcagaaagtgattgccttggagcaggtggggtgggatagctaggaaggagcctacgggaaacttttggggtgatggagatgttctgtatcttgttttggatggtgatcttgtgggtatttaaaattattaaaactcatctaaatgaacatttaaaaactggttgttttattgtatataaattgtactttaattaaacacacacactcagaaacatactttcagtggctcttagaataaagaaaaaacttcctcatgggatctacaaagcactgtcaggtctattctgccagtcctcatcctgcaccgacttccccctggctttcyctgagtcagctacagtggctcttacttcatctacagtggggataacctctccaaagagcctttgcacaggctgttcctttgtgtaaactgttcttcccagccctctttttctagcccacctggcctctccttcagatctcaattcagttgtcscttccttaggaaagttctttcctgaactccctgattagaccaaccctcctggtacataccctcatttcatgacgcaccactcctctatttcaacagtagcattagctacatttatcggtgtgtttttatagatcagtgtccagcgtactcactagtttgtaagttagggcaggaaccattgctcgttctccaatgtatttcccttgcctaaccatagagtttggcatgcagtagatactcaagaattataggatgattgaatgagggatctgttgattttcttacttataggaaatggtgactattacagtagtgggaatgatctgactaacttcactgatattccccctggtggagtagaggagaaagctaaaaataatgccgttttactgaggtaagagttactgacctttgtctgatcccagagggcccgttcttagtcatcaaagtggtatttagttgagcaaaagtgcaatatctgcttctctgtgtcagtgcagttaattgtgactttggacaagcatatttctctaaactgcctccatccataggtgggcattcattctttctctttgacctctgttacctgttcatcctgctggtctcatgagatttgactggaaaacataaaagtgagctatagttgtaaacaaaattatcttgcaytgaggcagaggaatttagcaaattctcatccagccagaggaatgggagatttccatgaacgctgaaggtaggagactcggaggagtcttgtaaacacaggaggaggtcatgaaggcttttctctttattcctgccaaatctgtaattcccacttgytgtgatattgcagcatgtgctcagtcacccaacctaatctctaagactgcggctggtttacagccctgaactcactgtccagaatacaagattcaaaccagggttgacccataggtctcactggttggtcttccatccactgccattcagacggatgccctggatgaatctggtgcggaagaccagggaagtggcaggacaaggaggcactgctggtggtggctgtggaaacacccagcctgacagaaggctttatctcagagtcagactgtcttgcccatgcttyagtcatgctgctttggcacatttaatgattttgtgtttccatttctgtagggaatttgtgggctgttttatagattttcctaagcctctgattgcagtggtcaatggtccagctgtgggcatctccgtcaccctccttgggctattcgatgccgtgtatgcatctgacagggtaagtcagytcctagaaagcaagaggtcaggcaagcagcgcgagatgagagcctttgaatcctccttcagcgttgccagtcataagcaggttacatgttgtttgtggtagaattaactgaatttagatttttcccaaagcattaggctgatttgactgattttatttttccttcattattaacttgcattttgttgtgaacattgttccaactctgactgttccggattctaatcaaattccacaataggtatacagctttcatgttattctgaaagattcaggagacacttgaaaatttgttatgggagggaggaatagcatctttgcaggttgtgcaagggattagttgatcctttttactgagtaaatggatttagaattttagaaggagaaggacctgtgagcattatctactgtcactccctcctttgcagataagaaaactgaagctctgagaagttccttgcccagaacacaattcagccttgtgttcaccattgcattatacagattttagtttttatttttactacagtagtaatatatatgtcatagtggaaaataaaattttgaaagatatgaaaaagtaccaagaaaagctacaaggtaaaaatcactccttatcttgccayctagagataaccagtcctaacgtttgggttattaacttatcttgtttaaccagtccctgactgctggaaccctaggctgtttccaatttttatcattacaagcacctaataaccacctttagggtatcagattgtccagtgacttatgcttatgtgatggtaaactgtgctgatgattgcagccttctagggagcatatggtttttaccactgaagagatttctagttttgttcagaggtattttccccactgatagacaggaccatataatagcatccttaattcttcgaattttcttttgctggattccattgaaccagattggatgtattgacagacctaattcttatgaataattttcccacaaaattagcaaatgagattctaggtgccaggctgcccagcctttgtaggtagaggtttctgttcaaaggcagaaatcaatgtctttgttcacagtctgtgtattagatgactgattagtcattgacctgcttttaacagggactgggtcaatggttcctgacctaaaattggggatctcattctttaatacttggagggcaaatattgtatttgaatyttgttctgattctcccactgaattgaaaattactttcaatatacatcatccttatttttttttttttaagagatgggagtctcactctgtcacccaagctggaatgcagtggcacgatcttggctcactgcagccaccacctcccgggttcaagcgattctcccactcagcctcctgagtagtacaggtgcgtgccaccacatcgagctaatttttttgtatttttagtagagacagggtttcactgtgtcggccaggctggtctcgaactcctgacctcaagtgattcgcctgcgttggcctcctgaagtgctgggagtacaggtgtgagccactgagcctggcctgcatcaaccttttaaaaatgttgatgacttccatcttatgatataaattgtaataaatgttgaaatcagaaaacatatatacataatacatataaaacatatctattctatatatattataatatatgtatattgcatatatatattaaatgctaaaaaatttggccaaaagtaaaatttatttgtcaaatagtgtcttctgataaaagtttacccaaccaaacaaatcaagcatcatttaaaataaaggaaattgaggtgggcagatcacctgaggtcaggagttcaagaccagcctggccaacatggtgaaacaccatctctactaaaaatataaaaattagccgggcttggtggcgggtgtctgtaatcccagctacattggaggctgaggcaggagaattgcttgaacccaggaggtagaggttgcagtgagccgagatcgtaccactgcactccagcctaggtgacagagcgagactctgtctcaaaaaaatatataagtaaaaaataaataaaataaaggaaatatgctaaaggaaaaggctgtagaaaaaattgttttataagatttaccattattggcttcaagaataaatatcatattaaatgatgggttaatatttaacccatataaccaaaatattaatcagtacatttaatctattttatactgtgggcaatggttaataatgcctattagctctgtcagcaaatgatacatttcctgtatgagttaagaaaaaggtagaaatcataacaataataaatctttgagtggtcactgtttaggcactctattcacatgcattatgtatattataaatatacgcatacacacacacatattcacgtaatgtacagagtagcccgatgaaagaaggacttggccaggcacagtggctcacgcctctaatcctggcactttgggaggccagggcaagtggatcacctgaggtcgggagttcaagaccagcctggccaatgtggtgaaaccccttctctactaaaaatacaaaaattagccaggtgtggtggcaggcgcctgtagtcccagctacttggtaggctgaggcaagagtaaggctgggcaacagagtgagaccctgtctataaaaacaaacattctcctccaatgtggcaaaaataagttttacaatctaggctgggcatggtggctcatgcctgtaatcttagcactttgggaggccaaggcaggtggatcacttgaggtcaggaattcgagaccagcctggccaacatggtgaagccccgtctctactaaaaatacaaaaatgagctgggtgtggtggtgcacgcctataatcccaactgctcgggaggctgaggcaggagaatcgcttgaacccgggaggcggaggttgcagcgagttgagattgcgccactgcactcaaggctgggcaaccgagcaagactccgtctcaaaaaaaaaaaaaaagcaaagaaggattggttcccattttacaaatgagaaaactgtggtacagagagggtaagaaactttcccaacgtccctaagtagtctgacgccagagcctaaacccttaactccacctgctgctctctttctgaaaatcagcattttaaatgctgcttactggcaactttgcatgtacctgtttgtgtccctttagctgttgttggcagktttctcagtttcctgcttgtattccttaggctgtgtcttctgggtacatttttttgaataagttttcttttggataaaaaaagaagatacatgacattaacagaaacttttaaaaatattgtgattatttttatgtatatgctgcatatgttatagatttatatcttctaacagttatatagtaaaaacaacagcgtgtctgattataggaaatgaaatctaaatattcttttacatattatgaattttaaattaacattctttcataatttattcattaagaaacacaaaaatatgtcttaaatgtaaaaaaaaaaaaamctaaaaatgactatatactaaataaccaatattgaattaattccagtagttaaagccaaccaaaaaaaccactggggcaaaatcaagacaaatgacrgattgaggaaacaatttttcaactcatgtaacaaaagctgatctctccacgatactttttaaagtttgtctataaagcgatagatccacaagctaaaataaaaatgggcaatggtgaggaatgaataggtcagacaaaatgaaatataaagggctattaaaaccatatgagagaaaccactgagaaaatgaaaagataagccatagaccaggagaaaagatttgcctgacgctctaataaaagacttgcaatctgaatgtgtatcttacaactatataataggaaggtaaacagcctaacttaaaaaaatagtggagaaaatatcttaacagttgcttcaccaaagaaaatatacgtatgtctaataagtacatggtaagagacttaataccattaatggttagggacatgtaaattaaaaccacagtgagaccccactacatacatactagcatggttaaaatgaaaaagacttaatagctaggtttagtgaggatrtggagcaattggaactttcatacattgctggtgggaatgtcaaatggtacaaccactctagaaaacagtctagcagcttytgagctaaatatacatttaccacacagaccagccataccacttaggtatttacctatgataatttaaaagagattcacccagtgacctgtacacaagtgttcctaactgcctttttgttaacattatctgaacatttttatttttaaattttttttcagtttcattgaggtatacttgacaaataagaattgtacagtcaggtgctgcataacaacattttagtcaatggcagactgcatgtaaaacgctggtctcctaagattataacaccatatcttactataccttttcttttttttttttcactctgtcatccaggctggagtacagtggcatgatctcggctcactgcagcctcctcctcccgggttcaagcaattcttgtgcctcagcctcccgagtagctgggactccaggtgcacaccaccacaccaggctaatttttgtatttttagtagagatggggtttcactacgttggccaggctggtctcgaactgctgacctcaggtgatttgcccacctctgcctcccaaagtgttgggattacaggcatgagccaccacaccyggcctaccttttctatgtttgatatatttagatacacaaatgccatttgttataactgcctagagtattaagtatagtaacatgctgtccaagttggtagcctggaagcagtaggsawtaccacatagctaggtgtgcagtaggctgtggcatccaagtatatgtaagtatactccatgatattggcacaatgacaaaattgcctaattatgcatttctcagaacatatccccattgttaagcaacacacgactagatatatttaaggtgttcaacttgtttttcatagcagccttcttcatagtagcctttcatacgttgctagtggcagtgtcaaatggtacaaccatttgaatgctagaaacaacaccaatggcattaactggtgaatgataaacatattattgtgcatccatacaaaggaatactactcagaaatagcgaggaacaaactactaatacatacaacagcatggtgactctcagaagtcagactcaaaakgctacagaatgtaggattccacttatacagcattctataaaagtcaaaactgtagggacagaaaacagattagcagttgcttgggggtgggagggagggactgactacagaagggcccccggaacctttcagggtggctgaaatgttccgcatgtcagtagtggtggtggctatgtaactctctatttgttcaaactcatccaactatacacttttaaagggtgaattgtgtgtgcatattaaccacataatcttaatttttaaataaatattattaagtattgtgaagttataagcaaatcgtgatttttaaaaataacacatgaagccwggcatggtggctcacgcctgtgatcctagcactttgggaggccgaggcaggtggatcacctgaggtaagaagtttgaaaccaacctggccaacagggcgaaaccccgtctctacgaaaaatacaaaaattagccaggcatggcagygcatgcctgtaatcgtagctgctgtggaggctgaggcaggagaatcgcttgaacccaaggggtggaggttgcagtgagccgagatcgcgccacttcactgcagcctgggcaaaagagcgaaaccctttgtctcaaaaaaaaaaaaaaaatcacacatgaaaagatggttttcttttctctcctgccyctgcaggcaacatttcatacaccatttagtcacctaggccaaagtccggaaggatgctcctcttacacttttccgaagataatgagcccagccaaggtaacttttggaatgtttaaatataaaattttatgagtcatctcaagaaagaaggaagagtaatctcatatactctcccttctttcccttggtaatatggacaaaagagaagctaatgatttgcttttcaactctttaagagttttaccaatggaggaatcaggctatgggaagtatctgctatgcaggaaaattagaaattctctctgcagttcccagaactgggatcctcctcttcagctggctgcttagtgctagctgcactgcaagcagcacagcacctcagccttgcagctgtgtggcattagtcacttgaaggaccagggctgtgccagcctcccttggtcccctgagtttggaggccactcrgttcctttatggatgaccagtrtctcctaaggagagacatgatgacgtcttcactttcagagttacagtaagtaccaacagatgggaggttttgtgggggctcacggctgccagagccacccccaatcacagcagcccttccatcagcctgctcacgggtgtattctctcccaggctggttaagtggctgctcaggtctttcactgtgtttcctagttgcccacgccctgtggcatgactcgaaggggattgtgacaagacyagaagctgagctataggaaaaggcttagcaaatattgctgcaagatctcaaagtggggcagtgggaattgagcttgttttcattgcctattaggattttgttaaaaacttatatrtgtatgtttttactctcattaggctatcacataccctgaattgaacttgggaagggggcagaactgactctacaagtcttagagcatttggctattagagcattccttggctgggtgcagtggctcacacctgtaatcccagcactttgggaggccaaggctggtggatcacttgagatcaggagttcaagaccagccgggccaacatagtgaaatgctgtctctactaaaaatacaaaaattagccggggcatggtggygggcacctgtaatcccagctactcaagaggctgaggcaggagaatcatttgaacccaggaggtggaggttacagtgagccaagatcgtgcctctgcactccagcctgggcagcacagtgagactctgtctcaaaaaaaagaagagcattccttttctggaaaagaaattgcaaatggagagaggatatccacttaatgtcctcagttttttcggaagctaactataagtctttgctttcctttagtcaaatagaactaatttgagtaccaatgcaggtaaagaaaactctcagagccagatcactgggtagtttccagagaatggaattttgaaagtttctaaaggttgacccaatgaccgtaatttttctctccttttttcctctgtaaaataatagtttatagtgtatcaaatggaaaatcatagctgctgtgggttatagaatcaagcatctgcttcagatcatttctgccctggaccccctgatcttgcccctccaacaacgatacacagaagcagcagcccttatagaccttcccaggagcctgtctcagcacacagtttgcaaaccgttgcctattgaggtcatcagcttctcccttactgagaaataccagcaacctcaaaagaccatgagtacatctctctaagcctcctgaaagcagttaactgaagccttgttttattaagttagtatcttaaccttgcttcttgcttttcatttcaggcaacagagatgcttatttttggaaagaagttaacagcrggagaggcatgtgctcaaggacttgttactgaagttttcyctgatagcacttttcagaaagaagtctggaccaggctgaaggcatttgcaaagcttcccccaaatgytagtattcatcttttacttctaagaaccttgaaaatgatttcctaagggaaaaatttatttgccttcagagaataagtcataaaaagcacaagacacatctttagttacctctaagcacatctaaatttggaattaaaaaataactgtagtaatgttggaaatgcagtactgatttttacaaaacttatcaaatagaccttccatttctgtgtggggacagagggcaattctgtatggggattacttgagcaggatgctaggcagtatttgctgagcacttttactttggaatccaggtgagaagcatggattagctactttgagagtcttattgtatagcacttttgtttttgtatgtggtagtgagtgactgattgcttttatattcttgctattcaaaatgtagtcctggagccagaagcttgagcagctacctgaggctttttggaaatgtattatcacaggcctgccccacacctactgaagcgatttatatgcacactgaattttgagaagcactgtcttatattacacatgcagcttaagatttaacagcattagggccgagaacagtggctcacacctgtagtctcagtactttgggaggccaagaagggcagatcacctgaggtcaggagttcaagaacagcctggccaacatggcaaaaccacatctctatttaaaaaatacaaaaattagccaggcgtggtggtgggcacctgtaatcccagctactctggatgctgaggcagggagaattgcttgaacccgggaggcagaggttgcaatgagccaagattgcaccactgcactccagcctgggcgacagagtgagactatgtctcagaaaaaaaaaaaagatttaacaggatttattaaatgaacatgggagaaacaagaaccagaatcatagaataatctcactcctattagattaactctttttttctttttgagacagagtctcacttgtcacccaggctggagtgcaatggtgcgatctcagctcactgcaacctccgcctcccgggttcaagcaattctcttgactcagcctcctgagtagctgggatcacaggcatgtaccaccacaaccagctaatttttgtatttttagtagagatggggtttcaccatgttggccaggctggtcttgaactcctgacctcaactgatctgcccgcctcggcctccccamgtgctgggattacaggcatgagtccacgtccagcctaggtcaactcttaaccttattgttggttttgtttttcyaggycttgagaatttcaaaagaggtaatcaggaaaagagagagagaaaaactacacgctgttaatgctgaagaatgcaatgtccttcagggaagatggctatcagatgaatgcacaaatgctgtggtgaacttcttatccagaaaatcaaaactgtgatgaccactacagcagagtaaagcatgtccaaggaaggatgtgctgttacctctgatttcyagtactggaactaaataagcttcattgtgccttttgtagtgctagaatatcaattacaatgatgatatttcactacagctctgatgaataaaaagttttgtaaaacaagcttaagaattcacacaggtgtttggtagtagagagtcttacgtcttttgacatgaatcgttgttgccaggaacactggaacatggtgcctggggtcctactttgaaaagcactcacagcattacaggctgaagtcatgtctttgaatgccactatagcactttgacgtccacaaacagtgrctgactgaattgggccaaatgctgacagcctacagatcactgacttgaggtcttcagtgggttgcatgttctttttcagccatgtagcaagggagcaaaatggaaggaatagtattactagaaaacaaataagaatcaagaataagaataagaacccaaataagaatcttagttgggtttttttgcacaatttaataaagaggcatgaagggaaaactgggtcatttcattggaaagcaatgctctgtatgagtaattgttttcttatttgttagagtcccattcttgtttaatgtggtactttatgaaaggcatccctgcaagctgccttgattgtccttgtaacaccctgttttgatttcatagctatcacttgacaaggactgagggtgtaattccaagggctacagaaaaggatgggatattttgcttttcttagtcttccttttgacctttcctttaaggtcaaagttagctaactcaccaaatctcttaactttttagttctaaattttttattccagtaattgtaatccaagatgttcagttttatagaaaatataagaatagaaataagcattcgtttcaattgagcagttactagtgcttaatgcccattatcatattttatccaccaaaaacaatgccaaaaattaaaaatgaggtaggtctgttgctactacccattttcaagtaggcatcccgaggcatggagattaaactagcttctccagagtcaaactcccagtaaatgtcaaaatgaagataaaaatctaggcagagttctcatcccacaatggcagcacaagccaactactgcccattcctccacaaattacaactaaaatctctagaagaaatacgaaaaagaactacttgagcatgctgaaattaatcaaaagcaggtggattgttaaagggtgtcaaaatacagagaagcaactgcacaaggataagtttcccagattacgagaaataaacacaattgctggaatctaactccggagcatggtattagaagtaaggcaaaactgcagttacttttgcaccaacctaatacttctgcctcagaggcacacccctattgtggggtggtgctgcggtgaccatggagtggccagccaaatagaagttgaggaaaacaaaaacactttgaaaaggaaaagggccctctgggggctaaagagtgaaagcaagaagagactcccagagccaagagaaagaagctctaattctgtgtatgaacctagataagtctgattcataagtgagacagactcaaaccagcatagcaaaggctttgcgaagtgtactgggattttaaccaccacccacagaagatcaagacagcttgtagtctgaacctaaccagattgatttcttgctaaaacaaaaatggcattttccagatgattgtaacatgatccacaaaaacataacttccatccaatgccacaatatagtaaatacagtaaatatccaggatccatatgacataatattggatccaaccatacaatagaatatctaaggccctgagaagaagytgtcatatggatccaggatccatatgacataatatttacaaaatgatgtgacataaaaagaaacatggaaatgtgaacacttggacagaaggagcagagtgaaacttgttgcaacatcctggcctgtctgtgggctgcctacagaaatggtgtctgtaatgtccaactcaggtatcagactggagacagcaaatagttttgatttcaggctggaagccacagaaggcagtggtgagcaatgcagcacatgaaaactacacagggattgctgccctgtggacttctgagggcaggagattacagaggaatacaatagaatatctaaggccctaagaaaaagctgcagtgagactgtttaggaaatgaagacctttaaaatcacctttgatggggacagggagcacacacacattcacaggaaggaagcatgcctagaaaagacctgagaagacctggactaatctcagattagtgaagacctcatggacttacaaattagtgaggtcttacatgccagtctgcaaagactgggagagtggccatattttttttaaatacccaattttcaaaaaaagatcataaggcatgcaaagaaccagggaaagatggcccactgaaatgaacaaaacacatctccagaaacagttctggaagaaacacaggcatcaggcttactagactttaaaacaactgtcagccaggtgcgatggctcatgcctataatcccagcactttgggaggccaaggcagtcagatcacttgaggccaggagttgacactagcctggccaacatagtgaaaccccatctctactaaaaatacaaaaaaattagcagagcatggtgctgcacacctgtaatcccagctactcagaaggctgaggcatgagaatcactggaacccaggaggcagaggttgcagtgagccaagatcacatgactgcgcttcagcctgggcaacagagtgagagtctgtctcaaaacaacaacaacaaaaaaccacaaatgtcaaatatactcgcagaactgtagaaaaacatgaacaaagaacaaaggaaagtcaagaaaacatatgaacaaaatgagaatatcaacaaagaaattataaaaaaaaatattgagctgaaaagtacaataactaatttgaaaattttattagaggagatcaacagcaaactcaaataagtagaagaaagaataagcaaatttgaaaacagctcatttgaaattattgaatttgagaagcatacagaagaaaaaataaagtgaacagaggcttagggacttatgagatgccatcacactgaccaatatatgcataatgggagtcccagaaggaggtgagaaaaatgaggagagagactatttgaataaataatagctgaaaacctgccaaatatgaggaaagacatggatatacaaatccaagctcaatggtctccaagtaggacaaacctgaagagacccatacgaagacacataatcaaagctgacaaaagtgcaagataaagagaatcttggaaggcatcaagagaaaagtgactatatacaagagatctgcgataagactatccgagtattatttcagcaagaaccttggagactagaggcagtggggtgatatatttaaagtgctgaaaattttaaaaaaaactgtcaactgagagttctatacctggtaaaatgtttcttcaaaaatgagggagaaattaagacattcccataaaaacaaaagctgagggaatttattattactacacttgccctacaagaaatgttaaaggaagtcctccagtttgaaatgaaataatgctagatagtaactggaagacagatgaaaatataaagttctccagtaaaggtaaatatatgaacaaatataaaaacagtattaatgtaattttggtttataactccacttttgattttctacaggatttaagagacaattgcataaaataattatgaatctatgttaatgaatatataatattaaaccgtataatttgtgacatcaataacataaggggagaaaagctttaaggaagtagagtttttatatgcaattgaagttaagttggtatcaattaagatagatcatcataactctaggatgttatatgtagtgcacatagtaaacaccaagaaaatatacgcaagcagaagtgagaatcaaaatatgccattacaacaactttaaacatgaaggaaggcagtaatcaaggaaatgagggagaaaaaaacctgtaagggacagagaaaacaacaaaatggcaaaactaattgctttcttttcagcaatttatatgtaattggattgaaaacatatcaaaaatcataagttggcagagtgggtataaaaccaggatcaactatatactgtttaaaagagtctcactttagatctaaggatatgagtagggtgaaagtggaaggattaaaaagatattccatgccaatagtaataaaaagagagcagaaatggctatactaattgacaaaatagactttaagtcaaaaactgttaaaagagacaaagacagacataatataatgctaaaagtctcaatttaccaagaagatatgacaattataaacatatgcactaaatattagagctccaaaatatatgaagcaaacattgacagaattgaagaataaatggccctacaataatagtagaaaacttcaatacctccactttcttcagtggatagagaaccaggtagaagatcataggggaatataggacttaaaaaacactatagacccactggacccagcagacacatacagtacactgcacttaacaacaacagaatatgtattttttaagtgcacatggagcattttccatatgttaagccataggacatcttaatagatttaaaaattgaaatacaaaatatcatttctcatcacaatgaaatgaaactagaagttaacagcaaaaacctggacaattcacaagtatgtagaaattaacacacttttaaataaccaatgggtcaagaaaaatcacaaaaaatttaaaatatcttgacacaaatgaaaacacgacaaaccaaaacttatgggaggatctgaaagcagtgctaagatggaaatttgcagctgcaaacacattaagaaaaaagaaagattttgaataaacagcctagatttacaccataagaaactagaaaaagaacaaactaaatccaaaactagcagaaagaaggaaaaaataaagattaaagataaataaatactagcaatgaaaattccaaaaaggaaattgagaaaaaccattcaatttataataacatcaaaaataaccaaatttaggaatgagtttatccaatgaggcataatacttagtgaaaactacaaaacattactgaaataaattacagaagacaaataaataaatgggaagacttcacatgttcacggattaaaagacttagtattattgagatattaatactacccaaggtgatttgcagatttaatgtaattctatcaaggtcccaacaatgtgtttgcagatatgtaaaatgtattctaaaatgcatatggaatcttaagggaccccaaataggcataattaccatacaatcccacaattccacttctgggtatgtcttagtccatttttgttgctatgatagaataccataaactgagtaatttataaagaaaatatatttatttggctcatggttctggagcctgggaatccaagattgaggggccacatgtggtaagggtcttcttgctgcatcatatcatggcaaaggcatagcatgtcaaggaaccacacaagtgaaacagagagaaaaaggagattgaccttctgacatactaacccactcccacagtaatggcattaatccactcatgagagcagaaccctcatgacctaatcacaccttaaaggtctcaccgttcaatacatcacatggcaattaaatttcttttttttttttttttgccacgaaaagattgttttattccatgaaaatattctcaacagaaaacactacctttaaatgaaggatttaccattaagaaatcaacatgtgcacaaaaagagtacaaattaccaaaaaattaaagatttttggggacatttcacatgtttaaaatttaagaatgatttaaactgtgcaaatacagatgtctttcctattataatagcccatatacaggttgcactattccacgtcaaggaacttgcctgctacggaagcaaatcctgcttttagaaaaacaaacagtggcttgaaaagaacagttagtcc

SEQ ID NO: 95009 - DNA, 28689 bp, Homo sapiens
cctatcagctgaaggctggaaaagaacaaaaatgctgaccttgcctcagttcatcctgcctgattgccttaaaactggtacatcagctttttcatgccctaagactcaaactgaaatattggcccttcctgcatcttcagactggacctacaccatcctctttcctgggtctcccacttgctgacttaccttacagacttggagcttactacccttcataatcacaggagctattctctctttctctgagcgtgcatgtgtgtttgtatatgtattatatatgtacacacacacacacacacacacacacacacacacacacggttggttctctggaaaacactgactaatacaggaccttaccatatgctgaacactattaggaatagaacaaggtgcacagtcaagtaggagaattgaaagtatcaacacctgcaatgaaatgtgataaaaagggcaaagaaggtgaggacaaaatactgtctaatgcaagatgaaggggtccagaaagaatgctttctcagaggaggtgactttgagctgggttttgaagactgagaggaggtttatcaggcaggaaaagaaagaaactgtttcccaagaataaacacacatgttaaaactcagctgaaatatctcccatgtgataagacctcactatctgctgtcactccagtgacagatgctccgattatgagaatctagccccctgaaacaccccccagtttgtttctggttctcttaagcatttactagacatgtggcttaggaggtcacctatctattccgagattcactgtcatcatctataaatgggaataataataccttatagggctatagcaaatagcaaattagatcttttataaaaaatttcaagctcatattaggcatttgatttatgtcatttcatgatgttccttccgaagggagatacagcaggtctattccagatccataggaaggcctttacaaaatgataggcctatgaataaattcaggaaaatgggttgaaacatgatgtaatgtatcaataactcacataaaatatataatattttatatatatttacatatgtacatttacatatgtaaatgaaaatcaatacattcatattagaattgaatgcaatgaatagcaatctttcagtgtttacctttttcctatctggacacatttctacccaagatatgtgcttggtgacaggatgaattaatataaaattacaaaatcactaaaacaaacaaaaaggtaccttttttttaacctgtcagtaagttcaattagtaaaaactattggtagataatatattttttactaaaaatgtttagaactcctcttgtttgtactgaagtctaccttctttgtaatctaaaaattcataattgaaaaggtgtaattttttaatattaccaataaattattctaaaagtcataaattctttaaagtatctctaatttttataagataaaatgatcttaagcaggtaaaagacaacaagaaaataacagaattctacttagtccagtgtctgtctatggatgggactctaaagacttggttattctcactttactgaacaggatgaggagtcagcaaaaaaaaaaaaaaaaaaaaaagggtatgtcaggtggagattttcttcccaacccttcagctttcctggccggcatgctttccttatggagggcctgtctcctggtttcactcagcttgcccttgcaaaggtgctggcaaaacttcaaggtcgagctgtctctagggttccccactgttgggatggccaggagcctttaaacactgctccgcagccacaccagagatgacaatgcatttgacctgcagcggggtcctgcgttggtgtttttaaaaactccttagacgattttattatgcagctaaggttaaggggcactgtgctagttaataaaagaggataggaagaaaagaaagggttagtgcaaatgaaaaatgagaaaagttgaattttcaggaagcagtattgaaaatgacagtttctctgtgtgtttgtcttttccatttattcaccattcatacatgtaatatcagcaacattcttcattgtaagctatatttctccaggaaagtgtggttatattaggatttcctaggaccgggtatgtgattttataaagctcttgtctattttatctgagcccagaggggtgtttattctcctttgaataaagccaagatggagaaatagcatcttaccaatatttccaatgagttaactctcctcacatgctcattagggcagtcctggaatatgtgcaccagaaggttctttaatacatgttttctaactccctgagggaatatacgaatttcaggtgtaaactcttttaattttcatgccatgcccttgatcaattcttaaagctgtcttaaaattgagccatattacttagcaattaaaaaaatacaagcaaagaagaatttaaattctacctggcactctgtggatcaattttctgagttcaatttacagttcaagaacaaacacagatacatggacatgcacacacacacatacacatatacataatacaatatgtatatatacatgcatgcactacctatatactatacatatacatacatatacatatatctgcatgtgtgtatgtgtataaaataacttctctaggaaacctcaacaaattgctgttcctttatgttttcaaaatataaaactcatatcagcatcatttccaatgtcaccctaggggtttcttctcattcttgccccttactgagaaaaaggagtgttttaagtgcatcatacaattaggatttgtatttgaatttttaggaagccattttttaaatgaagctggattgtagattaccaacacttctagctggtaatcactggagatctgtgcggtttggcatgctttcattagttatcaaatcataaatgtgcacattttacataagtgactattgaagaaaagaaatcgtggggatcgttgagaccaataacatcagctgaatatttttctgtcctccactggtttcacagctcttaatgtattgttttgaaaggattcttttcttcgtttgatctgcaaactatgtatttttttttaattccaaaatacatacctggtcaaaactttcacagttaaaatatgtatttaaaatagaaacttcttattggttgtttggatatagaattctctttgtcttatagagaaaaaaaactgattacaaaatatccaaacattcactgggatttcttttcttttttttcctttttttttttttgagacagggtctcactctgtcgcccaggcaggagtgcagtggcgcgatctcagctcactgcaacctcagcctcccaggttcaagcgattcttgtggctcagccttctcagtagttgggactacaggtgcccgccaccacctgacgggatttcaccatgttgcccaggctggtctcgagctcctggggtcaggtggtccacccgccttggcctccgaaagtgctgagattacaggggtgaggcgctgagcctggctgagatttctttagagaatagcagtccgtgggcaatagtctactcctctaactgatgattttaagattattcctgacattttttcaaacagaagagattattactaatatagagaacagtagtgaataatgctttattttattagcatataccattccaagtcctaatgatttctctgaaatcctgaggagcaggtaccctatctgattttttatttttttattttttgagacagagtctcactctgttgcctcggctagaatgcaatggcgcagtcttggctcactgcaacctctgcctcagggttcaagccattctcgtgtctcagcctccccagtagctgggactgcaggcatgtgccacacactgataaggtttggatctgtgttcccacccaaatctcatgttgttgaattataatccccagtgttggtggggcctggtgggaggtgattggatctcaggatgatttctcatgaatgggttaacactaccctttcagtactgtccttgtgacagcgaaggatttctcatgcgatctgattgtttaaaagcatatggcacattyccccactctctcttgcttctgcttttgccatgtgatgcacttgtgcaccctttgccttcttccatgattgtaagcttcctgggccttcccagaagccaagcagacgccagcatcatggttcctgtacagcctgttgaactataagccaattaagtctctttataaattactcagacttaagtatttctttatagcaatgtaagaacagactaatatgcatacatacctatgataaatctaatttgtatattgggcacagtaagagattaactaaaactaataatmgaacaattataacaatatactgttctaaaagttatatgaatgaggtgtctatctatccctttgtccctcaaatattttgttgtattgtaccacgggtaaaagatactatcgaaagtgagaccagagataaggggaaattactatatcggatgtttaagccaaataacaagacaagaaaaattaatgagaataaaagtaattgaacaggaagagaaaaacaaattattatttacagatgatacaattatttgtataggaaacctgatccaataaatacaaatatgtttagaaagtataagtgtgtttagcagttttgacttacataaggtcagtatacaaaatgcaaaagcatgtctctttactggtaataattgaccagaaaatataacatgaaacatcagcccatgtgtaatagcagcaaaatgtataaaacatctaaagctggcatggtggcacatgcgtgtaatcctagcggcttygggggctgaggtaggagaatcgctggaacctgggaggcagaggttgcagtgagctgagatcgtgccaatgcactccagcctgggagacagagcgagactcctctcaaaaaagtaaaaaataataaataaatgaatattaacaaataataaacaagatcttagtagaaaaattttgaaaatatattaaaggataaaaaaggagtatagaaatactattttcaagtgtacgattatatgctattttaagaatgtaaattattcccaaattaatatctaaattcaatataactttcttcaagatcccatcaagatattaagaaatttgatgagtgaattctaaaatgtaaataaaagaacaagtagattgaaaaagaaaagaaaggtaggggaaccagcttgctaattactaaggaatctacagaactttagtttagtacaaataaagtgacaaataaacagcagcgtgattttgcacaagaagagaacaatagattacaagatagcaaacactgaaatattctatatgtagcaccacaattagctggcaaagcaatcaattattcagtaaactgctgttaaaaacattggttagccacatgaagaaaagtaaagctggcttccttcttcatgtcctttgttaacataaactccaaatagattaaatgcttgaattgaaagatacaactggaaaacaaaataaaaaaaatgactagacaatttctatgatcacaaggtaaagaaggatttcttaaacttgacttgaaatatattaaactttacagggactctatggctatgaccacattaaaaaataacttttgtttaataaagataaagtgaacagggaatgagtatatttatattgcctaaacaaacagggagctctatctcaagtatcaaagagactttttcaaagcaccaagccaagttctgaaaaccccatggaaactgaacaaagtgtatgaatgaggatgcacagaggaggaaaacaaacagcccgcagtgtgcggagatctgcataaggtcacttgcaatcatggaaatgcaaattgaaacaacattttttacccctcaaaggttggcaaaatttagccaactggatctctgcaggtgtatatgggaaaatggaattcctcagaatatagtagcctgcaagctggaagacataagaaactcaggactgagagtttttcatggagacggcagggtgaaagagggaatgatgatgagggtaaaactaaatagtaataacagatgagaggaaaaagaaagmagattattgctgggaggtgatattgtcctatgagccaaggtttatgaataattgaggtgtctacttgaagtgttaaggctgttatcccagcataytcaggctgctgtaacagactaccacacactgggtgctttaaacaaggagcattgatttcttacggtttgggaggctggaagttcaagatcagggtgctgagtggccaggctgttagmgaaggctttcttcctggtttgcacatggtggccttcttgctgtattctcctatgacaaaaaatggaaagaaagatagtgaggtctctcctgtctcttcttaaagggtacttattccattatgggggctctaccctcatgacctaatcacctcccaaaggccacaccttctaaagccatcttattagggcttagagttttcagcatatgaattttgagacgacacagatgtttagttcacagcaggtatggaggttttaaaaagaagaatgaaacacaaacttcagaaggattactctgtttcatggagattgtactcatcatagagcccagcccatggcaggtgcttgtgtttcctaggctctttctaggaggagtccacataaagagcaacaacggaagcttttgtttgaatatttattgttgtctgtttctttctgatgcttccaaaactaacagaaaatttaatccgaacagggaattcagtttaacagcttaaacataagcaactgattgtcccaaataatcggaagtggaggggtaagataactacagcagttggctcaactcaggggccccagttgtatttctctgygactctcttgtggattttccatgatccattatgtgcacattatccagatggcctgaagaatgctgtccatgcatgggtttagtcctggttcctgagaccctgtctgaaaaagggggatgaaaattaccagggtcatctctcaccaaatatggctctacgccggagctggactcattcttcacaatacatggctgcaacatgtcaggtgaggagaaacccacacaattcgctacaaagggctcctgggggaaataagcacgtcagtaaccaagtcggatttttagaaggaaccccwgttggagctctgcagtrggaaagcataagtgtgcatttgacaaacagtaagaaggtggatctgcagagcaaagaatcctgcacaaaattcacatttaaggggtggggtgggaagagatggatagtcagatcattaagtgaacattattcttagcagagagaatgccaaaggggaaaaatcttctgaaatcatgatgtaaagacttgcaccagaatcaccaggtgtacctgtaagaactcatattcctgggtgtgacatcagcactctgctgagtcaagcccagcggatcctgaggtggactgaggagtgataatgccccctgtggagaagagctctttcaagagggtccctccattccttacaccccgcgaggctgtgaaagggggaatatgttttgccgatacatcttttcttgttgccttatgaatgtagcactgactcaagtgtctttagggcccaactttgtttaaaatgagcaaattgatttcttattccaggaaaagtacacataaaaagggtcatatggcttctttgacatcaaatagttttttaacataacaaactgttttgataaattgagtgcctctaaatcaaagccatatgggaggtactggggctgagagggcaggaggagcaggggtaattggccagcggttcaaacactgagtgattctaggcagtagacagccagatctgaggactggctacctcctctctattcccttctgcagatgccatgactctattactgttaaatatgttagctgctcatcagtcaagagactaaagcataatgagattgaaaggaaaattctgatgtgtcctagagaagaaaattatgttcacttagagtaaaatatctaatagrtcacaagcaacamatatatgcatttaatgttttaacaaaaaagaggaaaattcctctcctttccagcatgtgtgtgtgagcaatggagtgcatacaatgaacagtgaactaagagcacgtgggagtctcagggaycagagcaaatcagcctttcagcatcagcagtctggctgcatagcctgtaaccccgaatttcaacctgttcaccaaaatkgcactttgtaaaaaagaaaataagtcaaaaatatgccatattgatacaaattctggagtccactgcctcagttgccttttactaataacatgcattttccttgggaacattacttggctctttttactttaaattcctcatctgaaaaatgaggataacaagatgtacctgtattagtctgttttcacrctgctatgaagaaatacctgagactgggtaatttataaagaaagagaggtttaatgcactcacagttccacatggctggggaggccttcaatcatggtggaaggtgaaggagtagcaaaggcacctcttacatggtggcaggcaagagaacatttacaggggaactctcatttacgaaaccatcagatctcatgagatttattcacaatcatgagaacagcatgggaaaaacctgcccccatgattcaattacttcccactgggttcctcccatgacatgtggggattataggagctacaattcactatgagatttgtgtggagacacagccaaaccatatcaatayctcaaaggaccgatttcagaattaagcacatttctacatatatgtcgcttagggcagggcctggcatatagatatatttttagtaaaataataaatgttatatatgttggtagaacatttttcatattagatatatctgatgataattggttatctttagaatagacattatttttaaacctatattgataacactgggagtgacattcatcatcagattcacctacatagccaattagaaatttcatatacttttagcctcatccagctccaattttttctctcactctaacctatagcagtcgttctcaagcattctgatctcaggaatcacttgcatttagcttgtgtggattacatcaatcaaaatttacaattcaagaaattaaaatggagatgtttttgtttaaaaatgtattaattttatttaaaaataacaaccctaaatccattacctgttactatgtgacatttaaaaaaaaagtttctcaagacaaaattagcaaggagaatgwcattgttttatttactgcaartgtcttacttcatagaagacagcaaggttctcacacttgcttttgcattcaatctgttccaatatgttgcttcgattaaggtatactaagaaaatttgccctaatgcagataggtagctggagaaaatgaaaataatttaatagtctttgcagcctgttgtggaaattttaactttacacaaatgttcatactattgcacgttaaaatccattggtctatcttacagtttgaatgtgtattttacctatgcaatgtcttgtaacattatgcactggtcatttgaaaaactcttggctcatttgcgttacccagctcttgtaaatgttaacacattttattatatgaaaaaaattgcatttactaatatcagtatcaatttcatcagcaaagtgttaatttattgggaagctgtctggatcacagtggcagatttggatttttcaaaattctaattttttcttgcaagctttaattttgtaattggcaagaaaaatttccaatcagttttcttgaagtgacaggtgcatgctgttcatttttagaaatatgtctgccatacaagtctgagtgatcaaagattgctgtccaaggatctttcaactaaatgtggtgttccgtgaaagaattagctagttcagcttgcaactcaatcacataaatgatttccttgaggaaccattgtatctcaatccatagcagaagtgctttacaagtcctccttatttcatcatacagaatatttagaagatgtgaaatcgatgatttaattgaatacgattaataattttaccgagtaaagtacattcttaaakgaaattgrtgtgttttttcctgctactatttttcagtcgacagtttgtttcaaatgccttgattggtcctaacgtgccaacagttttggtcaccattgctttgaaaccaccggtgcaaacctcaatagtgtgaaaaagacataacatatgaagatattatgaaaataattttaacatgtctcatggttgccaaagattctgcaaacatcaccttgagaacccctgccctacagaagtgtcctttggccagcctggtttcgtctttttcttcccagtcaagctcacttgcaccatgttaatcttcctagtatctctgctctcccagacctccctgagctactgcatgaagctgccagcatctcaacagcaggctacattctgggtgtgtttcttctgagcacagagtatagggcctaatgttgtcaaatgaaagagtgaatgggccagtgagtgaatgaagagatgaatgaacaaacaaatgaacgagtggacaaacgtggttctggctgtactgtattttcttccatctctcaaacacatacagattgctcctacgtagggtgttttgcttccccttctcactgccaggagtattccttccgatatttcagcrtctggctcttcttatacaatctcagctaaaacgtcacaggcattccctggatcctcgaattaaaatagccattcgcgtctccctttacctcccattgtgctatttctctgcagtgcacatcacccctcaagtgtatttttatgtcagcatccagcacgtggcagccatttagtaaatatatttcactgaatgaatgactgaatagagcagaccattcaacagatatttattaagcatctaccacgtacaagccactgtggatttgatggctttgctctaaataagcttagggtaagtgtgtgttggtggtggggcagacagtaaaggaacaaacaacagagcaatccatgtgaattaacaatcccgttatttgtttaaggaacaatacacgttgttatgaaagtgtattaggtgggatgagaccttgccacggtcttttgatgtttccccaaggagatgttcattgagctagaaccacaaagatgagtaggtattaaacaccgagggcaggcaggcaggcgggtgggatgccttgtaccttaggcttattttactgcttgttagtgttgcataagttatttctctggacacatcttacatctttcctatctcccagaagttacagggctgggcacagagaaggaactcagcaaacaagaactggtgaggagaccagggccagaagccagggttagcacagctgtacctgtgcttgttgggcgtgtcagcatcccagttcctggtagtatatccacacccatgagatatgatgactatttgcataataacagattgcttttcatttccttctcttygcttcagtcctgtgtgcattttcagatgaagcttttgtcaggatccacagtctccctctccgctttctctccattgccccacaactctcgaaacatcctctagagcaaatcaatctttatttctttgccattatcgrcccttccataaatcagtcttgcccactcagtagctggtgtggcagggcctgcagctgtccactgcctgcaaatggtgccttttcttcttagctcatcatcgccagctgttcctggagcactgtaggctctgcattttcgacaagtgtctcatctgtaaaattatttctctatttttttcccctttcctccttcttgttcctggcagccgcccacagagctgcaccccaggcatatatcccagcgcacccagcacatgtctgtggctggcttttaggtaataaaagccagctttcagtaaatcataggagtaaggagatccataaatcttgttcttgccttgcacacatcaattctcactgtcatgaataccgcaggcatgagtcacttggcctgcacactaattttggacctagtcactgcccggaggtaatcaagtggggaggatgtcctggaggagattgtgttcctgcaaatcggtgtcttctggactgaatggagaattaggcccaattcaggcaaatggcaatgaactcagcagagccttctcatcacccaagggttatgtcatgcaatgtgtgcaaagacatgtgaagtctggaggaaagaaaggattccagaagccaccttcattgtttcgtagcatttagaacttcactattagctcccatcatgtaaatgtcctgacagaaaggacactatcargagggtatgctcagaatcccagtgctggcacatcccagaggcccagctattgcatctgtgcagtggggattargaacgtgctttgtagtgttaccccaaggaccaaatatgctaacacatgttagcacatgtttgttttatggttttaagttcagaaataaggtagcacctttagtggatgaataaaagacctgctgtacccccatgcggtgtttgctaggatcacagcaggtggaagagcagacacaggggattggacagttttatgctacatttgccatattgctcagtccttcccttgttcacccttaccaaagattgggcagtagctgatggtagaggttagaagcagctgaacttgaactaatggggtgacactgaaaacaatatttttttgcatgcaaaaatgtcatgattgatagtggttctgtccttatgccccaggtagctgkcatgagacctgggattaagagtggggtggggtagaggagggaagagggcattggaaatggaacttgtttcctaagtaggcaactcacctggcttgtctctcctgtgcccagtgccctccatgctccagctcctgggtaggagcattgccacagacagragggctatggacaagttctcctctttcttctcttcaatacctgcttcaaatatggcagaggtaagagaaatgggttaccctgacattccatgtctttcaaggacacagacacaggaaataagaaaaaaaattacaataagtactagaggacctggtctgtcataatatttattttaattttattatttttagagatggggcctggctatgtcgcccaggctggacttgggttcaagaagtcctcctacctcagcttcccaagcagccggggctatagttccctgccactgcacctggctatacacaccttttgtttttgttccccttcatcttgtagtttcttctactttgctctttcactgttttggcactgtggaggccaggaggcatggctacaagacagaggagggccatctggcctgctttggacttagcatgagaaacaaaatcttctattatattcccacattaagacctgtggggttatttgttaccacagcatagactaaataatcctgactaatacagcactgtaagaaggaatttgtttatgttctatgaaatagagttgcagccacctatggagatgggaggtatcaaataaaaatactaaagtttaataaaggtttaagactgttccacctagaaatatagactattaaatactcattgcccatccacgtgctcagtgtggaaactgaaggacttcctagtgccagatgatgtaataaatccatgagtgtgttgacccttcactaatcacctttgttttcattccttaaattttcccaggttctgttatgagccatggcagattcaagactgtctgtcttctccaaaatattrtcttctttccagcgacagtattcatccaatttaaatttattttattctgtgatcctttgatatacatattatatttaatgaatgtagtggattgatttcaaaagcagccacaatttttgaatcctctgagggtatccatgcccgctgcaatgtgactttgcaggtcttgccatcaagaagttgcttctccttctcatatttccaatctgggctggcctcgtggctagttttgaccaagacaatgcagctgaggggacactgtgttgctcctgyacctggcctcaagamaccttycacggttctgcttacagtgttgawaaatcaccgtcagcatgaaaccaagcctgggacatcctgttggtggatgacacacaccatgggggagactggttcctccagctgagaccagggggcactgccyagcaagcccaccttccatgtgttgagctgcctggatcacattggtagctgcagattcatgagtgagcccagctgagagcagaaaaatggctcggcctccctcagacctatgtttggattaagtaaatgcttgttttcttaagtcagtaaggagtttgtgattgcattctgtcccagatgactgtggcaatggataacaaacacaatggtggtcacaattaaaaatccctgtttgtctgaaggaatttcccatttagacaacctttacctatgtgatttatttaatttttgcaatacttttattgagtatatatttattcaaccttttttcctaaataaattgtttcagagaagtcacacattagtaaattctcaaacctaacatccggattctgggaggacagatgctttcctgcaagggtgktcttcactagaagagtatcagctcctagatgggctgtctggttcctctcctaagttttccaccataaaaatcccacagaatttaagcttcaagaagaatcactcaggaatttcccctgcatrgataagaaaacaaagcctttactttcagcattcattggccrcttttctcttttgcagttgataaatataggagacgtaggtaataatctcagcatgtggggygagggcttgtttttaagaagtcatttgtcctcaacaccttaaaccttaggcaattaatgctagaaataatatgctgatttgtatgttgtgtgtgtgtgtgtgtgtgtgtgtgtgtgtgtttcctaatatgaaataggaaggcctcaaaactccctagatgatcaaagtttatgacatatgctttttaagaaaataaactttattatatatacttaaggtatgcaacataatgctatggaatatgtataaatagtaaaaaaagtatactacagtgaaacagattaacatatctgtcatctctcctagttattcatttttttctttgtgtggcaagagcagctaaaatctagccattcagcatgaatcccaaatacagctcgagtttattacttgtagtggtatgttgggctgtaggtctccagccttgttcatccttcatatttgctactttctatcccctgacctaccccgccagtttccttctcccactcccaaacatcatcacctctggtaaccactgctttgttctctatctctatacatttggtttttttgattccacatataagtgagatcatgcaatatatatttttttctgtaccatggcatatatttttaacccatacacataatgtacttggcaatgatcattgctgaagttgcataattccgcttctcatcaggtatcagcctaaccttttgaggctgcagtgcttgaggtggtatgatgtctgtgagagaaagatgatgtgtgtagagagttcattctttgagcagaattcatttccagtggcatcctccttataaacacagttgtagtttcacactgtaaaaaaagaattaaagagcataaacaccgatgattttaacaccactttctgaatcaacaaatagtatctgcctttaagttcaggtaatcagatataaaatttttccttgaaacaggtttttgtttctggttgaaacaacttgagactaggtcaggggcagaaggcactatttaaatatagcaaaatttaagtaagaccttcaggagtctcattgccaagggattaatatgataaaccatagtgaaaaaaatgtcaacagcaaactttagtccttccttctcatttcaccctactccttttgagggattactttgctattctcttatttgattattccatatttcaatgaccatccatttctatcataattcaatcctgtactttaaggacacctacagggagttaaacaccggtgaatttgtaatggttgacagtgctgcaaagcacatgaatagacgccaacatatataattctaccacattttacagtggaagcttgaaaaattttcttttctgacataaaaacccagaaaatcttccaagacccaaatagccaagccccagaaaaggatgaataaccaagcacatagaccactaagagctcatactactcatatttttgctatttcaaaaaaatctacctcatgacatggatttacacacaggggagtataagcatgtctaatgacagccaagtgacatttgacaaaataaaagtcccttttcatacattgttgctaggtttcagcaggctttaatttgcaggtctgggaaaattacaccaagtctattttacttaattgaagttagcaacagtcatgtgtaaaaaaaaaaaaaaaaaaaagaccaccatttgcattcctaattctgactcaaggtacatatgtgcttatagcaattttagtgaaactatgggtagattctksacatgttgactttagccatccgatatggaagaaatggattgtgttgtatcctagctttagaatattatgtggttaagtgcctctcatatctgcagtatatatggtataaatatagaaaaacactggacaaactaaagttatgtatgtgtcaattgaatatttcataagagcacttcttgtagaaaataggtcttgaccagagtatgtgaaagtttgtgtttatatgattataatagatcaagcaaaactttttcagttttgttcaaactccactaaaatttttctccccatgttccatccaggagtgactaatagtgacaaacccagggacctagtgaatatggagaaagaagtgaaggtatgtcaggaattgagagcmtaccatgtgcactttttcttagaccatatagttttgttttcacaatcatgtgatgagttcttgtgtttgttagtttcatgtgtcaatttggctaggctgtggtgcccagatatttggttaaacagcagtgtagatatttctgtgaaggtattttttcaaatgaaattaatacttaaatcagtagaccttgaataaagcagattattgtctgtaacttgagtgggcctctttgaatcacctgaccttagagaaaaagatgaaggtcttccgaggaagagggaattctgcctctagactctcttttgatttgagctgtaacaacgcctcctcccagaatctccagcctgccggcctgctctgcagatttcaaacttgcagcccccaaaaccacgtaagccagttctttaagataaatttatgtgtatgtgtatgtctatgtgtatgtatatgtgcatgtgtatgtgactatacaagtgtatttatatgtatctatatatttatgtgtgcgtatatgtatatgtgtatgtataagtgtgtgtatatgtgtatatatgtatatgtgtatctatatgtatatrtgtatatgtatgtatgcatacatgcatatttatatgtgtgtatgtatatgtgtatgtgcrtgcatacattacatgtgcatgtgtatgtatatgtgcattttatgtatatttgcacatatttgtgtatgtgtacatatgtgtatgtgtatccacatgtgtatgtatatgtgtatgtggaggtatatgtgcatgtgtagtatatacatgtggatgtggatgtacatgtgtgtatggatgtgtatgtgcttgtgtatgtgcatatatatgtgcaagtgcatgcatatatgtatgtctatgtgcatatgtatatatataagtatatgtatatgtatatgtgcatgtgtatatgtatgtatttgtgtacgtgtatgcatatgtgcatgtgtatctgtgtatgtgcacgtatatatgtatrtctgcatgtgtatgtatgtgtgtgtgtatgtgcatgtgtatgtatatgtgtatgtgcatgcatatgtatatgtaaatgtctatatgtatacacacatacacagcccattggttctgtttctctgcagaacaayggctaataagagttatctgttattatctctgatgtccagttgaggaaactgaggctcagagagattaagagactcttccaagatcaaaaaagtggaatagatattcaaatgagaactccaagcccagttctctttccactggaggctggatatcagaggcgtctggctataatttatgggaagaggtccaagctgggcagctgttggagtcagggaattttgtctacaggaagcaaggatcaggtaagataactggatctgaggggaatgtctactcactaagagcaataragggctgtggcattcacactgacagttcagtgaggtgtaggggcaagatgggaggtgtcataggaaaattggagtgcagacagagtttctgatggaattcatggagatggagcaagggtgccgtgtgtagggaatcatgtgtgattagatgaaattggcagtgatttggaagtcaagttaaacaatcgacatgtgatttatttcattgtaaagtatatattgagcactcagccacatcatgaaactccttcagtgaaaggatgggaaaggatgtggagctcatattctagtggggaagataaacatcaaagaaataattatgcacagaattatgttactgcaggtgcgataagcactatgaagagaaagctgtgtgtatcaggaagagcagcctcgtctattaggaaagccttcttggatgaagtggtgttttatggggcaggacaatggttcttagccttcttcccagcatgagctaaacaggggtgtctacagcttacattaagtagctgtgatttcttcttcccactggcagaaataaatttaatgaatggagaaaatgttctcacttctagttttcctctcatcgtatatttttaatcatggcacctgctastacttctctgtgctagcacgtgacaaatgaatgaacaagttgcaaatgaatactaatgaaaagctggaaataatgcatcatatttattttaacagtttttttgttatcattactattttgttttgtgaagccatgtagttttttcatggaaacatactaacattatccctagttgagatgatggaattaaacatgcaagtgtcatgatgttccacaaaatgcaccaagagccaatccaaggaatgccgtggggcagcaggaggctgtgctaattttgtgtacagggaggaaagaggatatgaaattcttccatacgccaactacttcctatgtgccaagacttgtatgtgtatgatctcactgatcctttacaacgatacagtgcgatgggtgtcagcagtattcctattttgaggtgagaaagtgaggcttagagaaatccattgacttgcccagtcatagcattcgcatatggcaaatggtttagaatcaggcatcccaattcaagatgtctgcgttactcagtggtcaccagaaaatagtgtatgtatgtatttgtatagatatagatgtgtgtgtgtgtgtatatatatatatgtgtgtgtatatatatatgtgtatatatatgtatgtatatatatatgtgtatatatatgtatgtgtgtgtgtgtgtatatatatatatatatatatgtatttatggagagagacagagaatcagagagaaagagatttcaggaattggctcacccaattgtgggagtgacaagcctgaaatgtatagggcaggctggcaggctggggatttaggcaagggttgatgttgcagctcaagtctgaaggcttgaaactgtggtacaggttttactttatagccttaagatgaattttttcttctatgagaaacctcatcctttgctcttaaggtcctcaactgatcgaatgaggcccatttgcattacggagggtgatccactttactcaacatctactgatttcagtgttaattgcatctaagaaataccatcacagcaataactggatcagtgtttggccaaacaaggagacaccatcgcctggccaagctgacgtggaaattagccatcatgacatcttcccttaaattattgggttgtaccttctaaactccggtttggcattgcccagactaaggctgaactggaagtacgatttcagactctggcgcagatggtggctggctcatgtctctgtctgtgtgaagggctgactccctgggaaacacctgttcacctgcctccccaccctgctgttcctcatgaactcgttccatctaactactttcccagttacatcttgtgtttttggtccctgtttttgcctcttgttctaccatcttttggtaaaccatctttatgctggcttttccgacctcacccttgcccctggagtgcttacatgagagattttttggttgaccttctgggactctaaagcctttcccagctcagatttcagaattgccccttggcctcttctcccagagaaattaggacaaaccttccctcagatagtctctcccttgcagatttctgcattccggggtgtatgtgtggaggactttgcaggggatatgcatgatggcgtaagggaattaatttctaaaacttcgacttccatattactatttcctaacgttgatgggcccaaaaagggacctgagagggagactacctttgaacttcccttttcataatcaactcttcacatttgagaagagcatgagtctcatgcatagcaaatctgatccccgaggaggtaaaccccgagaagaacctaacaaaatatgatttattagttcctttaatcaaagcaccgtaattgttccccaacccaatattatctcaataagagataactttgcaatgaaagttaattatttatgtttaataattacttataaaaatgtaatacacttattatgccttactgattacttgtataccattaatgattttaatcatagtcattcatcacttagtgatgggaatatgttctgagacatgaggtcttaggcacttttgtccttgtacaaacatcacagagtgtcctggcatagacctggacagtacagctgactacacagctggatatatggtatggcctattgctctaagctataaacctgtagcatgcgttgctgtaatgggtagtttaggcaattgaaacacaatggtaaatatttgtatatctaatcatagaaaaggtacaataaaatatagtataaaatatttttgaaagggtgtacctgtayagagcacttaaccatgaatggagcttgcaggactggaagttgctctgggtgagtgagtgagtgacgagtgaatgtgaaggccgaggacattagtgtacactcctgcagactttataaacactcgacattagagctacattaaatttatgaatttttttcttttgtcaattataaattaaccttagcttactgtaagatttttacttgattaacttaaaattttttttgactctttctaaacatagaaagrgtattttaagtaataccctcactcactcacccaragccacttacacctgcagtccccactcaaccccagcaccctgctggctgaagtctgcgtggagcagtgcaccctcatggactccaagatgaagcccctgtggatcatgtacagcaatgaggaggcaggcagtggtggcagggtgagcgtcagccttaagagggatgatgacctctggcaggacatgctgaccrtgcagacgatccggctcatggacgtcctgtggaagcagcaggggctggacctgaggatgaccccctaaggctgcctccccactggggaccacacaggcgtcgttgaggtgctactccacccagacaccatcgccaacatccaactcaacaaccgcaacatggatggaggcaacgaagagttcaccctctcctgtgctggctactgtgtggccacgtacgtgctgggcatcggtgatcggcacagcgacaacatcatgatccgagcgagtgggcagctgttccacattgatttttgccactttctgggggaatttcaagaccamgtttggaatcaaccgtcagcgtgtcccattcatcctcacctatgactttgtccatgtgattgagcaggggaagactaataatatgagaaatttgaaaggttccggggctactgtgaaagggcctaacaccatcctgcggcgccacgggcttctcttcctccacctctttgccctgatgcaggcagcaggcctgcctgagctcagctgctccaaagacatccggtatctcaaggactccctggcaccggggaaaacagaggaggcgctgaagcacttccgagtgaagtttaamgaagcacttccgagtgaagtttaacgaagcacttccgagtgaagtttaacgaagccctccgcgagagctggaaaccgagtgaactggctggcccacaacgtgtccgaagataaccggcagtagcggctcctccctgccccggcccgagaggaggcagccgcgagtcgtggggaccaggcacgttggtggtcctaaaggggctgaagagcctgacctgcacctcacgggaaagaacctacacagccacctttttttttttttacactagttatttctgtatgacttgaaatgtttaaggagctaaacagccataaacggaaatgcctccttcgcgcagcggcggtgctgggctgctcgaggctgcaccttgctcttggctgaggagggtcaccccaagtcttccagccggtggatctgggcccagcaaagactgttctgctccccggggaccttcttcccaggccagactgcctgggtccaagcacttggcggtcacctggtgcctactgtccgacaggacgccccgatcctcatcggctcgagcgacccaccttgtgcatcctctctagactgagttctggcagctccccgagggggccagggtaccctctagattcagggatgcttgctctccacttttcaagtgggtcttgggtacaagaattccctcgcctctgtctattgtaaagtgattttgtttgcaggtaagaaaataatagacgactcaccaaacctctacggctggagagatcgggcccagccccataaagcagtatatgtgctggtcctcagggcatgttaaagagacctgggcctcatggagctcaccctggtcatgcatgaagctggtcagaggcgaacactgccattatctcaattttttttttttttttttttgagacaaagcctcactctgttgcccaggctggagtgcagtggcgtgatcttggctccctgcaacctccaccccccgggttcaagtgagtttcctgcctcagcctcctgggtagctgggattacaggagtgcaccaccacgcccagctaattattgtatttttagtagagacggggttttaccatgttggccaggctggtctcgaactcctgacctcaggtgatccacccacctcagtctcccaaagtgctgggatttcaggcgtgacccaccgttcctggctcactctgccgttatctgtgagccgcctctgaaagcaggttttaacaaaagggtgaggccagatctcttccagaaccatcacctttgggaacctgctgtgagagtgctcaggtagcagaagtgtgagaacgagggggcgtgctgggatctttctctcttgactgtatttagtttgaaatggggcaggcttagccttaagcctccaaaggcctggatttgagcagctttagaaatgcaggttccagggcctctcccagccttcagaagccaactctgcagatgtgtctaggactgcgggcttttagcagcccacaggtgatcctaatgtatcagccgtggactcaggacctgcccggtgatgctgtaggtctctcaaaggtcttccaaaactccactgagccaaaagtagccgcctgctcagcagctcaggtgccagctctgttctgattcaccaggggtccatcagcagtcagtgccacccacggggcacctccctcgccacatgcctgttcctagcaagtgctgaaactcaccagaccccctgcgtgttttgaaatggaaaagccgtgcgcgcgcatatgtgttatttatttaagtgcacctgtgtgcgcgggcatgggagcgcactttgcaagccgcagcatttctggtagtgtagagtcttgtgtgcctggagagaagaatattttctattttttaaaaatcatttcatgtttctgtctgaggaaggtgagttcagtatcactgatgtgggtagagcccagcactttgtgaaaccttgaaatgagaagtaaaggcagatgaaaacaagaagaagaagaaaaaagatttaggtggggacacagagccaaactatatcagatctcttgtagcttatcttgttctctcatgtttacactttcttattttaatttttccccagttctttatttaccaaatggatgattcaggcttctggccaattgggaaggtatccctgggtaagtaccagttgtagctaaagcaggtgggtagaagttatacccaatggcgggctgaggtcctagccttgttgagggtggctgggggagctctcaattagatgtgctgaggttcatcaggatgcagagtgggagctacttcagctcccctaccaggccattaggaaagctactcacctcacagcctcattgctgacrcagagtttaagctattcaggtgagacaggaacatcttttcatctatgtgaattttgatattccaagtagagaggaatggtgactctgtctcttgtggaggcttgaatcttggtggtactcctcctgtagggctgtgctcaccctggcttgttccaggaaggctgtctataggtccctgtatgccgcattcctgtgggagaaactccagctgtgtctgcagtggagtgccagagggaaacaaggattccttttccaaggtccttcacgatcacagatactaccttctttttggggtacaggtgcagacttttcctacagcacgaagtactgcaattgtaactctgctgtgagaaacttcctaccagtggaaagatctggaactcaaggtctgctgttcagattcttttgtcccacagggtgatcccgtgatgtgatgctctaccacttcctctaggtatggggcttcctgagagtgagactgcagtgatcgttaatgctcttctgggtctagccacccagtaagaccaccaagctccaggctggtgctgaggaatgtctacaaagagtccagtgatgtggccagtcttcaggtctcccagccgtggataccagcacctgctctgatgaggtgattggggagtgatgtaggctctgagattccttggttgtagataggcttagtgtgctggctttcttgaatgctggttatgtgagcagtgaagttgtcatgtggacagactcaggacctctggttagccaggatattgcaggtggtggtattagctgtttttttttccttcatggaagcagtgttagtctgctgagagttgctgttatggcctgagttgattggcctccagccaggaggtggcatttgaaagaaagcaccagctgtggtagtagtatttggttttgagcttgctgtaagttggccaagggaaatattctggtttctcaggcaatgagtatggccacgaatctcccaacagtttatgtctattgtgttcagctaccagggcagatagagaaataccatcaggtgggggcaagtttaggtgggtctgaactcacaacctcctcgggtggggcttgctgcagtcactgtgggggagggagggtggttctcaggccaatgcttttatgttccagaggggagtatggctgcttctgttgtgcgggagagttcaccaggggagtgggggatagctggtagcaaaagacctcacccagctctcatgcagttgttgagcctggtctcactcctgcagtgccccactaacagtacctggtttagatccaggcagcctgcatgcagaactcagacctgccccaggccataagcttccttactgagagagcaccgcttttaggccatgcctctcaccatctggctgcaatggtgggtgccccatgcctgcactcatatctgctacagttcttattcacccccaattctgttcaagggggatcgtgcccatttgaaattatcacaaaattcagttgggagcttctttcaccctgttaccgctccttaattccactggctgccatccctgagggccccgatgagatatcatcaggaatggcttccctgagcttgagttggagactgggaatgtctacaaggttttatttgctgctgcttctactttatattttgctcggctccctatgtttgttccagctctaggtgaggttaaaaccttctcctgtgatctggtttttcagatttcccagtggggacatgtgattggaggcaggtttaccccctctcctactctgggaactcacagtttttcacctgtctcacagcatccaaatgtgacaaccaatgaaatcacacattctcactttctgttatcattgttctttagatgtttacgtctatgttcacaaagaggtgaacaaaaactctccttgcgtggggcttgccgtggccactgtcggggagggagagtggttctcaggccaatgggtgtatgttccaggataccatgctgtcctgaccacacttaatgatctcaatgtatttttaagtgttgtggcattctgcttctttcaaaggatctgtgaatgctttcagttttcctggtatgttcctgtggtggttcttggaacaaaagttcacagtgtgactctccacataccattctgtcctttcaagtgagagaggcatgctagccctgcctcctacctgacatcttggggggaaaaaaagaggatttgtaaacttttacttaaatttgcttattgtctgttttgaaattttcctattttcaaacatatgaaatgattgttataaaaaatatatccaggaagaagggagtgaaatttttgcgtggcatatatgtttctgacaagttaggtaacactgtttatttcttgggcttagagtgaatgacttaagaaaaatatagtcaagcgtagtcaaagatggaaggtctatttcttgaaaggtcttcaggaaaagtgactattggtttttaaagatatatgcagatcctttgaccttcctcccgttgaaggatgggttgatatttccagccccttgaatctgattgacactacatgaaagattgcatataagaacagcccagccaagtccttgctaaaactgcgagtacaataaaatgtttatcataagtgctaatgtttggagatctgttaggaggtaatagcaactcaaacggtgaccacagttttttaggtttaacagtagatccaagtttaaaacagtgttggttcacatctttgtgaatgtgaacataaacatgtaaagaacaattataatggaaagtggcaatgtataatttcattggttgtcacatttagatgccacttctcctagcatttctgctagttttctacaaaaagctaatgtcctgaaattcttgtccatatatctagggagcagaaagcctccttgaataaaagaacaacagatatttctcattaaatgggacaatgggccaggcgcggtggctcatgcctgtaatcccagcactttgggaggccgaggcgggcggatcaccaggtcaggagattgagaccatcctggctaacgtggtgaaaccctgtctttctaaaaatacaaaaaattagctggacatagtggcaggcggctgtagtcccagctactcaggaggctgaggcaggagaatggcgtgaacctgggagggggagcttgcagtgagccgagattgcaccactgcactccagcctgggtgacagagcgagactccgtctcaaaaaaaaaaaaaaaaaaaatgggacaatgagtctgctactttattttctctggccatgaagaattggggtgatgggcaggaagtatgtttctggcagggtccccaccgacacattcagtgccagcgttcttgcttctggatccaggataaccaaggcaagtctcatcgctgagtcctggagcagtgtcatagcaagctctgagcagctctgagctagctcttgcagggaaacatcttagatcaggacatgggcaattcctggggcaagaaggaatttcttataccctcatgctgaacactgtgctgttttgtgagtataaagaacaatggcgaacacactagtataaggactaatctttccaggagagaaaaatgggagggaggacttcctagttcctcattctgggaargaatatataaggaattaataagtcaaatattctctcctgtctttttgactgctcccatgcagtgtttctattttactaaggtttggttctctccttttgtgtctttt

SEQ ID NO: 95010 - DNA, 114329 bp, Homo sapiens
  misc_feature (1)...(114329): n = A,T,C or G
aataaaatattagcaatagttatttctgggtgttatgatttagaggaccttttttcttttttcttctcagtattttcattgtttctacactgaagatatattacctatataacaaaaatgttaaagggaaacaaaaaaatcagtacaaaacaataaagatatctccctatattgttctctatagctagatattcttccattcattccatcctataccattaaggtctgttttttagaaaattgatgacaattgtgctcacctctggttcagtagtgtcatttttatctgcttccagataaaaggaaaattaggggagagggtgcattactaggtcagccctactgtattattgtgcaagtgaacaggcttagtatcatctttgccattacaaataatccatgctggatatatttggaaatgaaatgttagttcttccttggaagccccaacgtgggtaatagttagtggtccatcgaagaaggagaaggggataaagaaaccaagggaggagtcccaacatgaatatgaagcccaaattccaagagctagactgagttggaacttgtcattttgtccctgtccccaaggagttcacagttgcatgaagaagacaagatggtaaggttgggtgagataagatagtgtggtttaaataatgcaggataagaggtggaggtgctaaacagtactgacccacaagaagattataagatgagtaaacctgatcctggatctccacattaatgctttttttgaactaatttccccctccctcagcctgtaacatctgtagaacatggaaaattcaacctacttgagactttccttatttataaaatagggataataataataatgcctactttattggtttattgagactattaaattaagtaatgcatctaaatgcaccagtccatgatgcgagtaaatgctcaataaatggtacctattatttctggcaaaaacagaagtcacctacatggagaataacaaagcgtttggaatcttgtagagttcttaaaaatcaaccaggtctccggtcttctagatttggatcatttctacaggcagtatctggaagccccttgagcttttaccctctgattttatccaaagaatgaagcacaactgaaatctctcattctcgctctcaacctctttcctaaatgtagcagatatatgcacatcctctgattcagatgcaaactttgtacctcacagaccctgcagaccatgtggctccacttcactgtcctttgcctcataggagtcaccctctttgggacattttctcacatttttgcaaaactctgctttagggaacagatttgaagcttacacactgaaataaaactgaataacaaggcttgattaggcccaaagactgaaggggaagaaaatttcctrttttatgattttaaattcaaagtcttgaatgcagggcattagagtgggaaggaagattcaagagaatgctaatgtgaaagagaaatggactcagaaaaagaaaagaaagagagtgtaatgtgctctttggttgctattctatttgagcccagttctccagccttcttcttaattttgtgagctaccccaaagttcctttcctgtgtaagatatcccaaatctctttttttcacttctagtaacccttactgtttcataaataaagagcaatggcagttaagaatgagaagcaaaataaataagatacaagaaaagtagagaagttgaagaaagtaactggatcctatgactgtctcaaatttggaagggttgcagtcctgatacatgcatatccttcaaaataagcccccccacctccaacactttttattaaaatggtatctattccttgcaacggagggagcaactctttttgtttgtttgttgtattggtcagcactctttcagttgcaagtgctaacagaaagatagctaatcactgcagcaataaagtccagggtccatgcattccgcatggctagattcagaggttcaaaggatattatcaggaatctaattctccctccatcagttctgctctcctctttgttggctttattgttggtttctcctcttgatagcagagatgaccattggaagcttcaggcttattttagattaattcatcatctcagaaaaagaagtttctcttttccaatagttttcacaaatgttgtgtggtttattctcactagaaagatttgagttactttcagttcttgaaatataattagaaagtgatgatgtcaggcttggtcatatgcctgtctttgaactatgttcaacccatacaaaccacatgggaataaaagagggaaaactgtttgtccaaggatggcaaggattactagttgtcctccataaccattctttagttctttcttgataccaaaatctcaaagtgttagccaggcatacagccatccagaatcaagactgcattttgaagcatctcttgaagctagaaagtcaaatgataaaatgctgtcaaattgaatacgagttgaaataatacaggcaacttccaagaaatgtccttaaacagatatggcatgtctttacatatttactaatgaccagaatgtgaacattctggctgcagatgaataagtcattgtagactatgtggtgactttagaatggaggaaatgcatggtagagtaacaagatagagggagcctgggtcccaaacactttggagcttccatacaagccctaaagtaccttcatctggactttcatgtgattacaaaaataaacatataccttgcttaagtgggtgttaattgacaaactacacaacccagcataatcctacctgatacccccaaagcagaatcacgtttgctactgtaaacagataaaggtttaggagatgggcaggtatgtccaatgtctcacttcctaaaaaattctatccaagtcagtcattactctgattggaaatttgaagaggaaaatcttcctggttttgatatatgtgagtacccagggatatcacagtttatgaattcaaaggttaaaaattatttaaaaattaagccaagcacagaattatgagaaatcattatattcatgttttattttctaagggaaatagtactgatcactgcagatgactccacatttaaccttgtaattttaacaatggaatacaaaaatagcaggttcatgatgtgaataattgttcaaagtatatataagagctccttccaggccaggcattgtggctcatgtctgtaattctagcactttgggaagctgaggcaggaggatcacttgagctcaggagttcaagaccagcttgggcaacacagtaagacttcatctctacaaaaaattaaaaaactagctaggtgtggtggcacatgcctgtagtcctagctactcaggaggctgaggcaggaggatcccttgagcccaggaagtggaggctgcagcatgagctatgattgcactactgcatgccagcatggtcaacagagtgagacacttcccctcacccaaaagaagaagaagaactcctttaagtatatttgttttgacatttttattaacaattagaatgaggaattaattaaattgtgatcaactgtggaaattacatgatgccaagtgagtggttcatgctttgggtaatggaatcatagaatcatgcaacatctaaactttgagagacttttaaggtgaatcatagcgtcccattttacagctgaggaacctgaggcttaaagggggtccacttgcccaaagtacacctggaataaagggtaaagctgggatacaatctttctactttttctttttgaataaatgaaagctacctcgtggtttgacttcaaatagacatttaaaaaaaactagggcagcgaactgatgagacaagatgaaatgcaatcaagtcaaatctataaggacctacacattgggtccaaaaaggcccactgtacaagcacagtatggggtagctgtgccttaatcagcagcacttgtaagaaacatttagagatgttacttggctgcaagtttgagatgtcagcagtgtgatatagccacaagaaaaagataatggagtcttaggtggcattactagaaatagaacttacaaaagagaggtgagagtcctgttgaacttttcaatccatatctgaaattcctcgcgcagtcccaggtgtgagattttagaagagacatagacaaattagcttacatccaggagaggagcctaggatggaattatatgaataatggtcaaaggaagttaggaagctgcaaagtgctgtaactaagagcttgaatcttggagtcaagactgcccgggtttaatcccagctctgccagttactgtgtatatgtttgttaaatcttcttatcactgcctgtagattagaaattacaataatacctatctccaaagataaatgaggtagtgcatgtcaagtgattagcgcataactcccataaaacaagcactcaataaatgctagctactattagaattaagacagcaaagtgatgccagggtaatggtaacaacttcataggttgtgaatatttaatcagttaacccatgccaggtgcttgatacaaagttggcagctattattattatctgccgtagaattggtttaaggtttctagggatgggactagtttggggacaaaatattttctggtttgggctaagatccacagaacctaatgatcagtttacagcctgaggaaggaagtcagttataccctgatcagggtgggggtcatggtggtcatctagacattctatggctgggtggtggtggagggcactcaccttgtgaacactcggacatggtgaattggcattggcattgctgttgaaggacaactcagccgtgttcttagccatggccatttaggcctgttctgatgcagggttctgatccaaggtaccagtgtggtccctcagggaagtactggggatcgtcacttatgcctgttctggacatggtcaccgagaactgtcctgtaggcattcacttaggaatcattcgaagtggaattgctcctggatacgttctccttgtactctgtttcctcctcctagtgtctctgtgtgaagaagccctccgcactcagccctcggcgaccctctggtaccctggacagctccccggggagcagtctaccgctaggcggcggctgctaagagaggaaccctcctgacgcggagtctgccgctccggggctcgctctccggcaggcccggggagaggtggggtgacaatgggttggggtgcgcgcgtgcctcataggtgcgagacagagcgagccgccggggtgtgagtcagcgcgctgggggctaagaagctgggtgaatagtcacggaatctcactcacgctcggctcctccacccatcccgtctacagcgcgtgtcccagtccagggcgtgcgtgcgctcggtgtccgattccgggctgtgtgtgtccatttggcgagatgtcgagagcggggggagtgtccttgtcggtgtatctgggcccaggttaggggacttctcctccccacccccgcgtgggtgtgggggtgtgtccgggctagggcgcgtgtgcttctgtgcctgtgcgtgcgtgtgcgggtcagggtggtgggaccgcgcatcagggcagggtgcctgcgtctgcgtctgggtctgtctggtctgcatgtcggcgcgatctcgacctggattcgtgtccctggatgtcgagaggccagcgtggtgggggtgtccagcctcccggaggagtactatgccttgacaccttcgtttcaccgccccaaagctggcctggggctccgtagggagtggcctgcatggggagggcccgcgtgctgtgtttctgggaggggtaagagagtgggggcgcagggggcgggccaggtccctgggcgcggcgcgggctcgggggacccgcgcggctgacgtcaggccactccttaaatagagccggcagcgcgctccgctcggcatttcccgaagagccagatcgcggccggcgccagcgccaccgtccggtccacccgccagcccgcacagccgcgccgccgccgagcgtttcgtgagcggcgctccgaggatcaggaatggggcttcgggcgctgggcgcgctccgaacccggcgcacgtaagagcctgggagcgcccgagccgcccggctgcccggagccccatcgcctaggaccgggagatgctggaaatgcaaccgcctgttccccgaggagccgctgccccsgggaccccctggcactgtgcgcaccctggtcagcagcccccggagaagacggcgcccccaacgcccgacccgcgtggccgtggcagcgccacgcgagccctctaggcgaccgcagggccacagcagctcagccgccggtgccccctcggaaaccatgacccccggcgcgggcccatggagccatggcctatagggtcctgggccgcgcggggccacctcagccgcggagggcgcgcaggctgctcttcgccttcacgctctcgctctcctgcacttacctgtgttacagcttcctgtgctgctgcgacgacctgggtcggagccgcctcctcggcgcgcctcgctgcctccgcggccccagcgcgggcggccagaaacttctccagaagtcccgcccctgtgatccctccgggccgacgcccagcgagcccagcgctcccagcgcgcccgccgccgccgtgcccgcccctcgcctctccggttccaaccactccggctcacccaagctgggtaccaagcggttgccccaagccctcattgtgggcgtgaagaaggggggcacccgggccgtrctggagtttatccgagtrcacccggacgtgcgggccttgggcacggaaccccacttctttgacaggaactacggccgcgggctggattggtacaggtaaggaccaggagctccgctccgtgcgccgggtctctgatcgcttccattgggagagccatccgtctcttgtgttttctctttcttttaacccaactcattgtatgggttcaggctgacacacagggccatggggggctatagcagaatttacccagaacttcccagtgataatctagacgggcagtttctggaactgcaaagggcgttccctcgtcactggagtcgttggaaaaggattatctccagtcaaacctaagtgccagctaaagggctaactccctctgtgaccagcccttagggtgcccaaggaagggacaggcgaggacctgtgctgcctgaacacggcaccatcctaaccctctgtaggtctttgctggtacccagcccctgaaggaccctgagaaagataaggcagttcagagaccccttgcagcaaggctctgtttgggaaaggtccccagagttcaggccaaatgacagtgcatcgccagaggtctccagtaagaaagatgccttagggagtctcaatctcaaacccaggtatttgctgctgtactggggctgagacccccagtagctctggccctggtaggtggtctttgagtagtggaaagagccctggattcgagtcttgggtctgtcacttaagcttgagcaagtttcttaaactctatcagcctctattttctcatccatcccaatgggcaggaaaacagcccttgccctgtataccttccaaggcttttctraagtgccttaaaggtgtaaaaaaggcacttcactttaagtgatgcttctaaaccagcagccaaaatgtggaatttgaaggtgggccctgcgggtgaaggctagcaagggtgctaggggcagccagtcatgcatagactgtctatgcttcccatgcatgccagggaggagaattatccccactgggggagtcaaggcacagaccaaagcttctgtgaggtggcagcgtccacgcctcaatgcctttctgcctccctagccctgtatggtgctgaagtgtaggactggcccacatgtgggtggtgtaatgtcccggctccctgttaacacataggtcacagaattctcacmattcacctgaccctttgaagactttctagaaacatctgcatagtaatgacgttggggaggggtaacatggtagctgacagagtagctgaggctaaatctgctgtttttatctacagctttaggcagtagaggtcatatgcatattggacaagggacaactttgttagaaagaggaccccactgggcttataatagrgggccctggatttaccaaaagtagggggaccgcaggcctgatttagcacctttgcaggttactcctggctcgcaatggttgtagttgtggggacgagtgggtcatgcatcatccttagcaggcagacacatagtctgtccccattgcagccaaccaggggctagctagcctgtgggtggccccagcaccattatgtctggttaatagggtagggtggcacagagtggcagatctggcttcatgccaatgccaatagcccactgtgctttccaagctgtgactcatgggcatcccgtctaggtgcatgtggacactgtctgagtcagatcccgggatggaggaggcaaacacattgaacagcagagcccagagtgggtcagccatgaccacattcgaatgcaggccagcatttcctcgatggaaaatctgaagatcattatgacaccttttgccaatgcgaagtgccttttaagtgcaaaacagcaaaattctgagcatctggctttcagatagtgtgccctccaataaatacctatgccctgaacccagactctcctccctcccctctcttccttccaccactaaacagcatacctcaggcttccatcctggagcccatgtcattcagggatggctgctttttatttttaaccttggcatgtgtgattctaagcaagcttagctgtgaaccttagagagggaagccatgtcttattttttatttatttatttttttttagcacatttggattctgctaaaattctcagctgagtcttggtaggttttatttaacatcaagcatgctgacagctctgcttctctcttctctccccctctaccacctttccccactttatatttctaaaagactatcctagaggtctggtcgtaattgccctctccccattgcttgaccaggaaggctgggaggctccagtgtcaggaaaaggctgtgtggtttgtgcttctttcagttacaaatccacacccctagagtcaagtgtttagcttgtggattgccatttctgtgcagggtaatactaccccacttagatgctgtttccataacctccagaacatctttctgtatgtaaagaacatttttgtacatttctttttattatgaccaagtcatacacattaactgcagaaatcatggggatttctggaatcttttaaaacccatgttcttactttcttcctgaatcccatgagctaggtacggtgggtgacaggatgttccgctctctgtccactgccttgtcagttcacagcttgccatcataaagccagggyccactgggcagacatagccaaagaacccttgcacccattggagtggactgtgctttccaaagggggaggtgcagagttgcaggcagtgtggatcttagtatgatctgcccacatcaaagcccctggtgataacttcctgatcaggaggctgaaatccagatagtggaaaaatcaaaagctttacccttaacccaaaggaggggcttctttctgtgggtaaatggagataaagctgaaggccgagtgatatagccagaaagacaccatcatttggagagaccaggagacagagtctgcaccttcttgtccttagcctgatccttcttgggaaccactcccgttcaggccactaccagagagcccagccttctgcagtgggttctctccaatttgctgtctttctgccatgccatctctgatgcttacctcaactatgtgtctggcctgrgttctcccccacccacatttcctccccgaggtaagagctgcagggtggtatctcctagctgcttggacaggtgggcaaagcaacaccaggctgatgagggaaccaggacagggaaccacagtcagaagaccagaggtggtcacctaggtgctgtatgatttgaagaaaggtgattctcccaagtctcagcttcctcatcatggaatgggacctgtagtaactatcctagaaacgtgttgtgaagaataaatgcaaaactgtacatgaaattgccctggaaaattctatgatatataaagacaaggcagtaatgttactactgttattgctactaattactacaacactcctgttatcactattagttctgttagtattaaaaatattagtttctgatgctgctgctgttactaaatcgggctgaggaattaatcaattgctataaagatagttccatactttcctctttattccttcccttcccttcctccttccctctctcccctttcccttctccttttccttccttccttccttcctccctccctccttgcctgccttccttccttccctccttccttccttccttccttccttccttccctccttccttccttccttccttccctccttccttccttccttccctccttccttccttccttccttcattccttccttccttccttccttccttcattccttccttccttccctccttccttccttccctccttccttcctccctccctccctcccttccttccttccctccttccttccgtccttccctccttccttccttccctccttccttcctccctcccttccttccttccttccttccctccttccttccttccctccttccttcctcccttcctcccttccttttctctttccttccctccttccatgttaacagaaagtcagttcacatatctgggtgtcagtctgctcacctgtgaaatggcaatgatgcctgaactgctttgcaaccttataaaaatcaagtaagactatctacatgaaaatgtttttccaaatctaaggttatctttaggatgctctccattctaaggaagtttggatgtgaaatagactcttcagggtcatcttttataaacagatataagctttgctgtgtgtagtagtttttagagtcacagggaaagctgagatatgtctgaagtgttctcaattttgctggtgtttcggtatggcaggggaatgtgtgtgtggaggaagtgtatcttttctaaatgcattgaaatgccaacaagagcaagttaatatgtgataattgactctgtgttctggtgtccaaattttgatagatgagcctgttctataaatttcagacttcacttcacaactctggttatttatttgttcagcatcgatgatgttcttgggatggtgcaaagcaaagaagacagaatatttgccccagaggcaacagtctaagtacgaaagagaataaaaagcccagaataagatctatcacattatccagttcattttcatcaagaaatcatattctaattgcaaagcccaattctggaaatgcaaaccttagaaaaaaataaaatcaaaggcagaaggtaaggggcctcctgccatgacgtagttaatgcagacagttttatcatctttcaacaaattgatcaacacacaaaacagactgatctgtgctcattgggtgtgcacatagatgaatgtgtgtgcacacccacacatgtgcacctgcatgcacaattgcagcatctatgcagacttaggcctttatacagaaattccctgtcttggtccaggcgaacgtcacacrgtatgattaaatgaaaccattgagtccataaacccccccccatttgtcttgcagcactctgtcagccttgcagcatgctgtagatataatacttagtgccagcaaatgtacagttcttgtcaggcatggaggaacattcggaatgggcaacaagaattgtcattgctcaaggaagttttttgaagagctggtttcccttccccttggagctgagaaggggaatgaagaacaggctttccccaaagccttagtctattaatccattttcacactgctgataaagacatacccaacactgggtaatttaaaaagaaaaagaggtttaatggactcacagttccatgtggctgaggaggcctcacaatcatgacagaaggagaaaggcatgttttacatggcagcaggcaagagagaaatgagagccaagcaaaaggggaaactccgtaaaaagccatcagatttcgtgagacttattcaccatcacgagaacagtatgcgggaaaccgccatgattcaattatctcccacctggtccctctgacaacatgtgggaattatgggagctacaattcaagatgagatttgggtggggacacagccaaaccctatcacttgttacaggagcattttaggtggagaagatgctgacagccccagtactttccagctacacacattgttaagcctgttttggatgttaacrtgtgaaaataccactgaaaggttctaagaagcgtctttaacatctctgaaattagcatgtatcttatgattgatggtgtcttagattgaagatataggatgtttccatactgattccggaaatgccctctgcctgggagacctggcttccccagcctaacctggactctctggaccttccaaagagccagtgactagaccctgcttcatctctgtagccagcagggctctcttctgattggtccgggagctggattcattttatatttttgaatgttacccatgccatctccctgaaagcaactatcctgaaattagggaaggtgtggggctggtactcacaggagataagatgcgatggtgggcatgtccttcatggcctgctgtacagaggcacttgctgtaccttgcacatatctggagacacatccaaagggccctagcggatttgaagcagagtcaatgctcaacaggtgctattacctgcatgctttggtaatgctttggtaatattctgtgtatctggtatgcagggctgtagaataactttggttagacctctatgaatcattcctgtatgatcgagtgacagggtgcatggggacggggtgggggarcacacagctccctattgatcagatcccctggaggacttgaggagaggtcatctccacctgtgagggctcagggcaggtgatagggaagtggggctttgcggggtagtgactcagaactgataagtcacacagataacctaaacctgtgggactcactgtctctgctggagctaactccggtgcaggttaatccattcgtttgtcaaatgctttccattggccaggcttggtgccaggctgctgtaggccrgttcagctgccactttgttctcctaatgggctgcatggctgggctgaagcactgtgaggttcacaagcagcttgacgaggtgggtaaaagccacccgggaggggaaatgaccttgtgcttctgaggaagttattattaagtatgtttttccagggcatatgagacagaggtttgggcttgggtgatctggagccggagcatcacgtggatttcctgggcatgggtccattgggtgtcttcctaagcttttcaaatcagaggagctgacaatggctccacctcagtgtccatggccaccagccaccatgaacactccccaagtgagaaagccagaagtgtctgctctaggtggaggctaaaggacctctcacactgccttccaaatggtggyatagttatttgggagggagaattttttcagatttcagacatttttgtgccaccttcatgacatttgccaaagcccagcatgacctctactattattttcttaatttttttttgagactcatgcagtggcacagtcaaggctcactgcagtctcaacctcccaggctcaagtgatcctcccacctcagcctcccaagtagctaggactacaggtgtgcaccaacacacctggttaatttttaaaatcctttgttagagccagggtcttgttttgttgcccgggctggtctcaaactcctgggctcaagcaatccttctgcctccacctcctagagtgctgggattacaggtgtgagccatctcatccaaccttcttaatttttttgcttaagttagcccatttaaaaatgataatttatcacaaagaacaagttttccccttcagtttatatattttagaatagacaagatattcagctgggtgcagtggctgacgcctgtaatcccagcactttgggaggccaaggcaggtggatcacctgaggtcaggagtttgagaccagcctggccaacatggtgaaaccccatctctactaaaaatacaaaaaattagctgggcgtggtggcgtgcgcctgtagtcccagctacttgggaggctgaggaaggagagttgcttgaacctgggaggcaggggttgcagtgagtcaagatagcaccactgcattccagcctgggcaacagagcaagactccgtctcagaaaaaaaaaaaaaagaaagaaagaaaaaaagatatttgtattgtgaaattcaaaagtgacaaagggtattcagagaaaattaatcccttcctttctacctcgtctttcagccaagaagttcctcttcccagaagcaaccataggtacctgtttttgtgtatctttctaaagatatgctatggatttgcaaatctaacacatactgtgcaagtatagttaaaataaatattgtttaaaagcaactttattttgaagccaccctaaatggaaaaccggcaacacttgccataattagaaagtgatcataaaaataagttagattgaaaacaaaacagtgtgattgaatttttgctctctagtgtgactggaatgttctaagcctgcagtgatttccatctttgcttaaaagaggatactaggggacactactaagagcagttaaagaaatatcaatatcaatgtgagatgtttctccttgatgtaatcagaaggaatgaaggtaaagaaggagagataatacatctcactgtgtgatttggtggtatttagtaagtctgtgtagtacctaaaattaccaagatgaggcacacaactgacgttatgggaaatattgttggagtttgccgaaaactcagtttaagtaaatccaatgatgggctgggtgcggtggtaatgccagcacttttggaggccgacgctgggtaatcgcttcagcccaggagttggagaccagcctgggcaacatagggagacctcttctctaaaaaaaaaaaaaaaaattagccaggcatggtggcaggcacctgtagtcccaactacttgggaggctgacatgggagattcacttgagcccaggagttcgaggctgcaatragctataattgcaccactgaactccagcctgggtgatagagtgagactgtttctagcttttcaggtttctttaatgtgttagcgattgggagagatgagccaaaagaaaactcagaacaaatatgagcactaagaggagagtttgacctgcaatatttacaagggagtgtagccttcccaagaaccaggttccctgaataaagggtgtggtgagcatttaaaagacaatgtcaactcacagggttacaatggatttcttcattattcttactggtggaaagtcagcagtattctccacaattaccacatctacatagattgtcacrtatctgtagaygtcagtgtcacaaaagtcagagataaagttgttttcactagggaatcagcaatttatgagacagtggcacaaggcttttctttattttaattttgaggctcatgtgagasaggacgtcccttttgtaaaatctcaggatgcaaaataccttttcttccattctggaaaacatgacgtgargcttaaaaacatgacatgggctgggcrtggtggctcatgcctgtaatcccagcamtttgggaggctgaggcaggtggatcacgaggtcaggagatcgagaccatctggttaacagagtgaaaccctgtctctactaagaatacaaaaaattagccgggcgtggtggcaggcacctgtagtcccagctactcaggaggctgaggcaagagaatggcgtgaacccgggaggcagagcttgcagtgagccgagatagagccactgcactccagcctgggtgacagggcgagactccrccaaaaagcaagcaaacaaacaaacaaacaaacaaacaaaccatgaagcttatacacagggctgggtaggatgtcaattttgctttytcagrcagtttaatttcactggatcaagagcggaagacaatgcaacttctttgtgtgcttttaactgtgtaaaagaagacccactgcagaaaatggtccctggaatttcccttkgttaacagaggcaatgcagagggtgtctatgatgacagggcttcccaagcttgcctttaayagggctgatggtcaattaaagggagatggctttcttccacctcagggtgctccctagcctcagtgcttgctgctgggtgaaggaaccccagatcaaccctgaggctgatggagagatgagtggrcattgaagcaaggcctcacggtggcacaagggctttttaggaagcatacaaagacagatcttattggagagagagagagagggagagaagcccggattccaagcatgaactcaaaatggagataaagttgcagaaactactayggaaggcagtttcagcatagctatgaaaaattcgaactctgagatcagaaggaatacrttggaatctcagctccaccacatgcaaggtgwgtgtgtgtgccaaccagaggcttctctgtctcagttcctccatctgcacactgggactaatcatattgactgccacatagggttgctgtgargattcaatgaacaattacacataaaagtgctcgaaacatctgtggcgcatgagaggtattaaaagcctgttagttgtcattattggccattgatttcttcatcatacctttattcagcagcatgctaaggacacagagatgaatataacacagagcctctgggctcttcactgtttggtgaggctattagatgttcgtggaaagtttgcacacaagtcagatgagaataggtaccatattagagatacaaggagagctatagtaagtagcatggaaaggagagaaaattcatttaggggaatttgggaaagcttcctggaggaggtggtatgttatttggacctcaatggccagagaggatttccttggatagagatgtttttggttgggggctaataaggagggggamcctatagggatgctgtttctaaatacattcacttcatgattttacctctgtttacagtcgaatcacaaaataaagtggytgccgggagcgggggctcacmcctgtaatcccagcactttgggaggccaaggtggcggataacctgaggtcaggagttcragaccagcctggccaacatggtgaaaccccatctctactaaaaatacaaaaattagctgggcgtggtggcgtgcgcctgtaktcccagctacttgggaggctgaggaaggagaatcacttgaaccttggaggcagaggttkcagtgagccgaaatcatgctgctgcactccagcctagacaaaaagagcaaaactccatctcaggaaaaaaaaatgttgtttcagatcactttagttccacatgaatttattggccacctgctatgtgccaggcaatgtgctaagccctggagaaatgaagatgakaaagagaattaatctctcttttaaagagaagaaggtacagasaaattcagyggtcagacttactgagagagagagaaagctcccagcatttgtggggtyrtagaggaggggcccccacccagggtgggccaaagaggctttcaagagagctggtgcctatgttttggggtgtttgcatctgctgttcctctacagggatcattcttcccccagagcatctcaggtctggctacttctcatcatgcakgtcccagctccaatgtcacctcctcaaagagaccattctcagccacctagtctaggctggctcacctcctcaccactctctatctttcctcaccaccttgctttatttacttcttacttctcactgacatctgaaattattgtgttcattttctcttttatttactctttccccactagcctgaaaactcccctagagaccaggaaccttgtctatcatattcatgactgtatccctgaagctcagaaaggtgtctggcacamgatgggtgctcaataaatatgcgttgagtgaatactcttagcratgagggatgattaggaattgatgagtctgttcggggctacaaacttgtccacccctttactaagcttgccacacctggttctgaaagaatatggaatgtagatgcaggtgactcagtcatcaataggtatttattgagcacctactgtgtgtcagycacatagtcactggggagagaggaatgaaaaaaacagacaacaatttctgccttcatgctgcttacttttctacagggtaggaaggagatagtcaataaataagtaagtcaaacatatctatgtcagatggtggtaagtgccatggagaaaatacagggaggcggagaaagaatacttggtctgggagggtgttgcagttttaagcagggtggttagggaaggcctagcagagaaggcaatatttgagtgatgatctgaaggaggtgaggaggcaaaacatgctgtgatctgggagaagaatgttctagcagaagcagcacacgtgcaaaggccctgaggacagagggtggctggcatgtttgaggaaaacccaggggccagtatgtccagggtggagtgcccaagaagtgcacaagggatgggaaataaacctggagaggtaacgggggccgcctggtgcaggaccctgtaggcctttgcaagaattttgccttctactctgagcaaatgcaggactattggctagtgttgagttaaggcattatatgatctgacttacactctacaaggatttcttgggctgttatgtaaggcagtaaggatggaaggaggaaaactggctagggggctgttgcaaaagtggttgcagcagtggtggtggagagagaaaggagaggggacagatgctggatacactttgaagggacagtggcaggatttgctgatgactgcatggggcaaggtgtgagagagaggactcaagaaagacggcattggtgatgatgatggtagcagtgttgctgctgaggttgatgatggtagcagtgttgctgctgaggttgatgatgtgatagtatttctttctttctttctttttttttttttttttttgagacaaggtcttgctctgttgcccatgctggagtgcagtggcacaatcatgactcacagtagtcttgaccctccaggctcaagcaatcctcccacttcagcctccctaatatgaaactacgggcatgaggcaccatgcccggctaatttttgtattttttttagggacagggtgtcaccatgttgcccagtcttgtctccaattcctctcaagcaatcctcctgccttggcttccctaagtgctaggattacaggcctgagccaccgtgcccagcccaagttcctactaaggacttgctatctttcaggctcttccttacaagtgacaggctggagtctgaaccaaatatacttcccaatacttgcccckggcttgactggtcctgtctatcatagacgtccctaaactaaccaaagaaaagaacattacgttctactgtagcttggagtcttcactcccaaataggtgggagatggcagattcctcatttctagagatctttgaggccttttttataaatacagagttcttaggtaacctcttgagatctgttaaaggtgaaattagccctcttccaacccagaaaaggcaagtgacactcaatgggagccaccctgctgctcattcttgttccagcctcatcagcatgtatggggaggtggctgccatgatgacactgccaaaattaagggccttgtgagtgtggcttcccttaagcagaattgaacatgataacaccttcctgcgagatagtcaaaatctgaatctctccgactttcccaaagctgctgaagcatggggaaatgttctctgccttggcagcctctttgcagtgtgtttctgctttgatggttttaataaagatatgaaatcatctaacagctttcattttgctcaggcgagatggcttaaagtggaggtagcatttcctaggatcaatmcccattttcagaagtggttggttaaactctctgaagtttatggccacttctagctgaaacactgtaggatctgaattattaattctgtgaaaaatgagttaagtcattgcaaagctctgtggtggygcagtccctactttaggccccctttcctgtattttctctagcacaaacatctccattaacaagaaatccttgggtaacttggccaaatctttgtctgtcactcatttcatggagaaggaaagaacttgacttaattcaattgttctttcctgcctaggatgaagaagagaaataaccagaaatgactctgggaagtactcaggtcagagccacttacaggttttcaaatttgggcatcattcaaatggcaattgtgcaagcaaggtagtctctaaaacaggaacctctgagcacctccttctatccaggtggctggtgccaagggaggtctgtagaaggatggggaagttctgagctgttctgaatatgtcattttcagctgggaacagtggccaagctgcagagagctcctatcccatggagaagcagttggaagtagtgacggcatcacaaactcaacatccttagggattctgtgggcacagaaatgaatgaatgaagttggctgtgggttatgcagaataggtggggatttgtcccatttatacaagtcttatttaaatagggtatttggtcccatttagrtagggtattgattgtcccatttagagaggacaatcagtagtcagtcctaaacaatatttttgacatctctgcatggccagatctcctagttatagctttttttwaaaaagaaaaagttgaatrtggcattttaaagaaagtgaactctcaatttataatcacatcttactgattcataactgttatagaacacttgtgggtcaaacaggacatgtctgtgggctggatgggacctacaatctgccctcttatgactctgggaaggtaggtcttagaaataggtactagtggcttctaatcctgcttctgccatggctgtggggtaagttgcttcatctttccaagctttggcttctcctatataagataaggatatgatgaaatgttcctgccttataggttgctgtagtgattcaatgtgataagaaagtgtttgattttattattgctgtcttgggtcctgcttccctgattgtgtttgaaggaggtgtaataatcgctaagctgatggctgtgcttggaagacaagaggcactcactgtcatcacacagaccttggtcaatatgagggaagctggggtcttaataattgggccaataaggaggagaagaatctcaagccaagatgacccatgcttggagaaacccatttggttatagaactgggccccagacagacagccagcaatctccacccctctttattgtcattcatgtacatgcccacagactcgctgtaggatgttgagtttgtgatgctgtcactgcttctctgtaggatagaagckctctgcaacttggtcattgcctccagctcccaatgacgtattcagaacaccaagagaagagcccatacacttctcttggcatcagctacctgaattgggtagangtgctcacaggttcttgttttagagatccgcttgcttgcacagaatgtgagtgcctttctcattctagtggtgtagatgaagtctaacctggagcatgtggtcttgctaacaggaggaggctaagagrtgagcaggggtgcaccataaagatcagccgggaagaatttctgttcacccttgatcagtactttgcacctgtagaatgacagargaacattgggatggtgggacagagagggctggagaatgaatacctgccaaggtggcctcagagatgacacaattctctttaaagccaaacaaagctttgatgcaaatggaggtttgttgggattggttctaagttcaatrttgagagcctggatgcatgaacccttggtggaagagctgggagaccatccaaactttgccttgcctctgggccaacctgtctacaacctccccaatcatggggtcatcaacgtcctttacaaaatctaacacgttgcctcccatccttcagtcatttttgtgccatcttcatgatttgttttttggacatatttacaaatagttccatttactttacattatattgaggtccactcataacttttactcaaatgcatttacctaaaattgaaactttatatcaccatcctaaatgaggctcctcaactcttgccagaaatagaatgtagtcataaaatgaatgcagtgaaaaccaaacaatgcagttcaattccagcccaatacagttgcctatgctttgttctacatgaggcagcctatttctctgttccagagagagatcaaaaactattagaaaggtgttaatgacattctagmacccaatgaagactttctccatgatggaataagaagacttgaatagaatggaaaaggaaagataattatcttctaatgatgtgattagatgacatttaaagccatatcatttgccacctaaatttgtttttagccactagtggtacatatcccacatcttgggaaatgcccactaagattctccctgctttgatggaactatattattttatcatgtttggttgtcattgtctatcaatagcctgggagggtctggctgacattataaagtctgggtggtttaaaaagctgtgattccaatttcaattgcaaatggatggggcatcatgggaaagcaagcgcagacatgaagaactggaggaaaagattcagctccgcagtatttttaggtctccttccctggatcggttttacataatttgtatctggattgtaggtttgataagttctgatatctgctctctaatatgttacctgagggctaacccatttttttttttttacaatctcartttaaatcaccgatgagaagtctttgtttattgttccttaaaaactgtaacttggatgaatctcaaaggcattatgcctagtgaagaaaggttatgcactgtatgtttcctttctataacactctcagacaaaatgaaaatgacagagaacaaatcagtagttccaagggcttagggcagcggggaggggtggccacaagaggcagacaagcgagttttctgggtgctctgtagggacacccaagggggactctgtacctgattgtggtggtggtcacatgtatctatacatgtgttaaaattcataaagtgaataccaataaaaagatgattttactggaagataattttaaaagataacattttttattttatttttattttttagacaggatctcattctgttgcccaggctggagtgcagtggcgtgatctcagctcactgtagccttgggctcccaggcttaagtgatcctcccacttcagcttcccgagtagctgggaccacaggcatgtgctaccatccccagctgatcttttttttttttttttttaatttttagtggagatagggtctttctgtgttgcccaagctggtttcaaactcttgggatcaagcagtcctcccacttcagcctctcaaagtgctaggatcacaggcatgagccactgtccctgatctgaagataaaattaaaaaataaaactttattcaagaaacatccctgattatagaactcagcagctggtgagcatcctacacccctcaacagaatgtggttcataatgatcaaagagacccagccctcacattttggggsttcacaagcttccctaaactttcatccttattatgagttacaatgtggatgtgggcggtattcaagtcttccccatcccacacccacattcctgaatgatgttggggtctgaagtaacggctgggaagattccactgtggtctgaggccagggtggccagcatagatgtccaaccaggcttctactgaaaggcatcagatcaggatactggaaggcagctatgggaaatgcatctcataaaaggagtgaatgctggtggataaaaagatccaactgaaggtcctggggtgagttgaasgggatacgagatgaggaaagatgggccatgagccacagtggaaggggtatcccagggttttccccaaacaagacagttcacaatctactgacagcaccgatgacctcctgcccaccagacagcctcaggactgagcaagaagcattcctgttgctcaccccacccaccctacaccctgagccaactcagcaaggaccaaaccttcctgatgcatgctgcccagtcagaacacccccagagctgggggacaacatctaccctggactgttgataccctcagttccttcttctgagtactatgtagagaacccatgcttcccagaggcttgtgtgctacaagacctcactccccagcctctgctaaagatgggccaccaatggtgttgatctggaattggacacagagactatgtctatgacagagagagtagccattaaaacctggctgtattgcttgcactttgtatccacaaggcacccctgcattcttccataacccccatttttcacttgggtgaagttgagtgggtttctttccttaggtgactcagacactacctgtgtggttgtcggtgcacacacttgggtgattgtgctgaagctacctggactggagacaagaatgtgtgtcttgctaamcygtggatgataattaaattcatggaagcagcagcaatgacccaggagcacrtatagctggagaagaaggtcagaggtagggtgtgaccaggaaatagattaacaaaatggggaggaggggcagaggatggtgtcacttcataaaccatggtgtggtagaggggaggcacaccggacctttttggggagtctactactctaaagactcttcctctgggctagcccatgagagaaagatatttgttatttcctaccatttttccatggttattggtctatgtggactcttgtagggtcagttttagttatttatatttgcctatttccaaaacagtggaatcacactacatattgaggtgtgtgggatctgctactatcatcattgtctccaacatatacttttatcttttctgattgtaagaataattaatttacaaataattatttaaataagcaaacaaaaaataaagagatattcacgtggcagaatccagcatagcagataaaagaaaatatatactcctatgggaagttctcragatatattgttcagctaaaaaaacaaaacaaaacaaaacaaaacaaaagcaaagtaaaaaacatattatcttttgtataaagggaggaatagataatgtatatttaacttatcttatttatgcataaataaattttgaaagcttacacaggaaactaataacagttttctgggtgtgaaattgggtgcatggaaaagcagggataggagagagacttttctgtatatctttttcatttttttgtgctgtgtgaatatattccttgaaaaattaaaatggaaatcgtgcattgtggaaaarttaggaaactgattaaagaattttaaaattacccaaagtgtacccacagttgtaatcaatgttaggattttgctttttaccattttagacaaatcatgtgtatacttaatataccattttatactgctattcatatcagtacatatagtagatataatatgctttatattccattttataacttgcaattttatttaacaatgtgatgcagrtatctctccatgccaataagtatatctacagaatcattttaaatgctcagaattattttaaatagcatctagttggatagatatactattatttatacaatcattaaccaaatcrcctactgatagacatttagattgctcccactttttgctctttaacaatgaaaggacagcagcaagtatcgtacccaatgattttcctcagaataaatttatttcagaggaattttggggtttgtgggtaaccatgctttaaaaagtatccattttttgggccgggcgcggtggctcacgcctgtaatcccagcactttgggaggccgaggcgggcggatcacgaggtcaggagatcgagaccatcccggctaaaacggtgaaaccccgtctctactaaaaatacaaaaaaaaattagccgggcgtagtggcggacgcctgtagtcccagctacttgggaggctgaggcaggagaatggcgtgaacccgggaggcggagcttgcagtgagccgtgatcccgccactgcactccagcctgggcgacagagcgagactccgtctcaaaaaaaaaaaaaaaagtatccattttttgatacaaattaccaagttttccccacccctatggcaatagagctgaagcatttatacttccctagcacagtctgaaaggacttttttccacatccttgtcaacattgactattagcaacctatttatttgctctttgtcaatctaatgcatgaaaactatctccttttaatttgaattttggggtatttaaaaatatttattagccatttgcattcattttctgaaatttttgsttaattttttccctgttggagatatttctttccatttttaaaagaggatgtttaatgattaatgctgcttatactggattgactttatcttttagtgttttattacttcagatgtttctagtgagctgaatttggcttggttctacattttcatccagtgtgatcatcttcatctttcagtaagaaagtcttaattttttatgtattcgattatcaacatatttgaacttttcaaatattcattttgttcatttttttttgtttattttttcttctcctgactcttcaatattggattggtggagccttctttattcccctgttacttccctctgaggtagaagttatataggctatttctgttctttttgtttkttttcttcatttttgtatttttaatagtacttatctgatcacactaagacttggcaaagagtaacttagagaacgactccaaacctccctattccccaattctatccatgttatggctgccaagtattttactccactttgtttttgtgattttaatgcttatcaaaacaacaataacacgtctacatagtttaaacaggtaaatcatattataaggcttatcacaaaacagcagcctactgtctgactaccctgtcttctgattcttgcttcacggaagcaacagattttcaattatttgggctctctctccacttctatgttcctccataytactaagtaacctgtttatattgagaagtcttacaaatcacaaaaaaaggatagccttgggagttaaaattgcagctgtcagttactcaggtaaaagataaatttcaaaacggcagttgtacaacatattgaaaataatgatgtgtactgaatggtgttactgaaacaagtcagatgtagccaaagctacactcagcagcaacttagcttctttattaaatgaagaaaatgaattgactaaggattcaaccacaaaagtgagtggaatgttaaagataaggaaacaaggaagtattttggaaaaatgaaaacagaaattaatgaatagagggaaatggaaacattgattcttaaaaaaaaaatccaagacttattctttgaaaaaaaaatagacaaacatttatggtatctaattaagaataagagataacaaaaatagacaaaattaggaatgagaaagaggatataaccataatctgtgaagggctgaagcatctttatgatactgaaaaaaaggattaggtaaaatctaacatttaatcctcataaaactctggttacgtgttaaagatattttcttagcatgatttaaaaaataattttcaagctaatagagacatgccatctgtattagtctgttcttgcactaccgataaagaagtacctgagactgggtaatttacaaaaaaagatttaattgactcatagttctgcagactgtacaggaagcacagtggcttctgcttctgggaggcctcaggaaacttacaaccatggcagaagatgaagaggaagcaggaggatgttaactctgatgctgcacttaagtcttataactgtatcaaccattatgtccttgtttactggctctggtcctgtccttcctgtctccattaatttatacctttctttagttgcatgtttttatttatctcttaatcagttgatggatttttatgagtatctatttttttttcaattagtgctttaacctgaccgctgtgcaagtttaggaatatctttctgcttttgtcacacatgaacaataattcagccaaattgaaatgtttaggatggctcactgcaacctctgcctcccagtttcaagtgattctcctgcctcagcctcctgggtagctgggatcacaggcatgcatcaccacgcctggctaaattttttttgttatttatttatttactagtagagacggggtttcaccatgttggccaggctrgtctcaaactcctggtctcaagtgatccacccacctcagcctcccaaagtgatgggtttataggtgtgagccaccatgcccagccaggacaaaatctttttaaaagcacctctgaaatcatggatctgttgtcttaggtcatctatgtgtgtgtggcagagaagattgatgtcagctaggttcatttttttccccttttgttggcaaactgttttgttttgttttcccttcctggatgcctatacagtttttttttttccattatttaaatagaaacggagcctctaaagtcagactgtcctgagttcaactctctgctgctttgcttagtaacctatgtcctcctgggcaacttatttacctgctctacacgtcattctcccatgtgtgaagtagggataataatcatactgggatgatatgaaaaatgaggaattaactgtgcaaagtgcttagaggaaggctgagcccatagcaagtactatataggagttttccaccttgatattgcagtagtcatcccttatccagggggatatgtccccagatccccagtggatgcctgaaactgccgataataccaaaccctatatataatgtttttttcctatgtgtgtgtgtgtgtgtatatatatgtgtatatatatacacatatatatacacagatatrkgtatatatatgtatatatatacatatatatatayacacacacacacygacatatatatattgacatatatgtatatatacacacaaacacacacacmtatatgtatgcacacacacgtatctatgataaagtttaagcttcaaattagggatagaagagttaatgcagaattagtcacagtattgttgttaagagattaacaactaataaaaaaagaacaattataactatactataataaagttatgttcatgtgatctctctctaaatatcttattttactatactcgttcttcttgtgatgatgtgagatgatctctaacacactagtccgaatttaatgttttcaaaaaaaagaatttcatcttttcaattctctgcatatgcttttacattcatctactgtttgtggcaagaggtactggttttccacttatgtgcctaacaaaattgtaggtaaaaaattgttctatgtaagtgaaaaaaaaagtgagtggaattcaaagaaaaatataaagtaaacaatagtgcaaggatatggcaggaactgtgggagttgcatgcaaatgactgaatttggagaaaatagacttaaagatcctttgttcagctctagaatctgtgcaaaaatccctctgtgtggtactcacagggatttttgcacaaagagattctagagctagacaaagaatctagctcctgagctcaaagggggctgaggatgtacaattccacgacccaggattttgaaggctcccttttggattcctctggaatatgttcgaagctgacccgctgagtatgcctggagttgcacctttcagatgcaagcatgcctgccacactggatcaaagaggcttttttgacagctggtggaggcctctttcctccagcagccgcagaatgagtccttaaaaatcatagaccacaaacggcctctttggctgatttgacattcttatttagttcaatccaggtgtatggtagctgaatagtttggaccagaatcctggctggggagaaaattgttatgaaaagctatcgattaggtgtccacagctgctgaaactcaacygcggaagcttctggagctgcatttatgaaagggcagggggcatggagaagggcaagaatgtgatggggcgaggaggcaatctgtttaaaggacaatggtttgtgaaggcaggcagtcgatgaaaagtcagttcttcctcttgctaggtagctgggtggatcatccagtgtctgctaggttgtgccttacgacctcttgaagcctgggagagagttcaggggttgctgcttcttcctgggaaggcctgccttggatctcattaccttcctttttcaccagtccaggccattgctgcccttcactgcccagcagcaaacactgaaccccacacttccctgcagagtccagcctgcacagcacaagccaacactgtttccccaatctgtgaatggcactgggctgtgattaacatggtgcatatccctgcattgcctctgacaaccctgtaaactctctccttcactgtattgaacatcctcaaacacctgtgcattactgcaaaataaagcatatctctgcttatgcctccagtttctgtgcctagaaaagtgctcggcacataaaaagattgataaatatttgtcgaatgaatgaatgagggtatgcaccagacgggatggggcaggactcagcaaggctcacaggcacccactgaaaacacatcagactgtttacttatagctgcaaatgcatgaaagactgaaaggggctcagaaaacctggaaggagttcctgacaagaacaaaatataagtagcaaaggaggagtagaacaatgctccttcctgcctggagcttcagaatagttgtaattttgaatggtctgtcaatcacacttgataaattaaatcataccttacagcagcatttcacaacgtttttttcttcttgactcaaaagctgctgcacaggtaactctgagagttatgtgaaattttctttcctgggtagcagtaacttcagtctttttcttcaattcaagtcaggatattgtakgcttttttttttgtttttgagatgacatacagtttttttccccttttacctaaagattctgatatcagccacccacctgctactcttgctagttagaattaatgtcttggaygcgtcttaccctcgttttgctcataaatttctccattaatatgatgaaaattacattgccatctctttcccccaaatttgtaaatacatatatgcaacattttgcagagaatgcatcctatttccgtggaagacgattgctttcaaaaccatgcaatatgaatgtgatctttacaaagggcctttcacctcagctttttaatgtaaaaataaatggtcacattctggaaaataatataaactcaaagttgtgcaaaataagaccaaaagtagcctttaaccttaccgaaaaggaaatttcaatgataatgtggctaatgtttagcttgcacaaggagctggaattgtggtgcaaagcacatgccatctttgacatcaaatcaattctgacttttggttttgatggtgacaggcacctgacttacaaargtaagtagaagcaaatccagccagaggattgcatgggcacatttgcctgataagggtggccataggtcaaagggcacaagatttctccaagacttcttaagatgaattcgtgccacatcatttccttcatacttgtgtcagggaggtcacttctagcccagtctgcatattctttgctgggtaaagaaacctttgcaatttaccagcaggagttcacaaaataggaatctttttttttttttcttgagacagagtctcattctgtcacccaggctggagttaagtgacacaatcttggctcactgcaacctctgcctcccagtttcaagagattctcctgcctcagcctccccagtagttgggattacaggcatgtgccaccacgcctggctaattttttttacttttagtagtgacagggttttgccatgttgcccaggctggcaaaataggaattctttgatggtgtcagggtgcatacaagaggtgagtacaggcttctggctgcactgggaggtagcagcagtttatacagctacatgctagaaagaatgggggaattatcattttctccatgaccatcctcatactattaggagaaatgtcagtggttctggagtaggtggtgacagtccacggaggcactccctaaatttcttttttaaattattattatactttaagttttagggtacatgtgcacaacgtgcaggttagttacatatgtatacatgtgccatgttggtgtgctgcacccattaactcgtcatttaacattaggtatatctcctaatgctattcctcccccctccccccaccccacaacaggccccagtgtgtgatgttccccttcctgtgtccatgtgttctcattgttcaattcccacctatgagtgagagcaaccggtgtttggttttttgtccttgtgagggtctcacattgtcacccgggctggagtgcaatggcgcgatctcagctcactgcaacctctgcttcctgggttcaagcgattctcctgcctcagcctcctgagtagctgggattacaggcacccaccagcatgcccagctaattttttatatttttagtagagacagcgtttcactatgttgcccaggctggtctcgaactcctgacctcatgatctgcccgccttggcctcccaaagtgctgggattacaggcatgagccacagcgcccggcctcactccctgaatttcttttggcactacctgcatttcttcctctgctcctaatcacaaaccagcttgacagcctcactgacttctctccttcagctacttgggaaattgtctcttctacttatatcctttagtggttattcttacagtgtttacttgacttaatagttcagaattcatcaatattttaccttcttcccaaataatacaagaaccttagcacactaattcctatcaccacccccacctaccatgtgattgtctagtattttaattataccgtgtttgtatcaaccaaaaccatatcatcattattgcttcctttttaaaaaacaagattgtagatttatccagaagttttcctaattcccctgcttactattgcttctttcatctacttcgtcttatgagttcagttgcctgtagtggtttttttcataggtgaattctgtcaatattttttaaatgaaaatgtctctgttttgccttctctttcaattaatcatttagctcagtatggaattctaggttggtgattattctcttatagaccctggaagacctaattccagaatcttctgaactttcctattgctgttgagaaaacttctctgaatctagacaatctgtctttttttttctctggttgtttttcgctgtatctttggtgttctgtaatgtaatttctttttttcttttctttctttttttttttttttttgagacagtatcttgctgttacccaggctggagtgcagtggtacaatcctggctcactgcaagctccacctcctgggtccaagtgattctcctgcctcagccttccgagtagctgggactaaaggcatgtgccaccacacccagctaatttttatatttttagcagagatagggttttgccattgttggtcaagctcgtctcgaactcctgacctcaggtaattcacccgcctcagcctcccaaagtgctgggattgcaggtgtgggccactgtgtccagctggagtactgtaattttattacaatgtgtctaaacatggatttgtttatttatttatcatttttcaagaatacaatgtattgttattaactagtcaccgtgttgtacaatagatctcaaaggtattcctcttatctaattgaaattttgtatcctttgacccacatctccccacccgccccagcctctggtraccacccttctacttatttatatttttatcagaatacattttgcttccacaatctgaggattcatgccttttatcaatcccggaaaattctcagccatcatctttttgcttattttcttttccattctctctacttcctcctcccagagcctcctgttagacacatgttacacctttggatgcattcctcccatctcttaaccttctccccagctttctttcctttagtctctccgtgttgagctacagaaaacttcctctacgatttttcatttgtttagagcatgtatttttaacaggaacaaggctcgatttggaaaggctagagcttttgccaaaactgggatttgtctgtcccattgtgccatgtaatgtgctcttctttcattagtgtttctggttttgaatctcttcaattatgttaaacatacttattttatagtttcttttaaattgctctagtatctcaagttctgaggaagatgccattctctttttgacatgttgtgtagggaaaaactttctcaaaccatgtttttcttctactctcacactgcaaaaatcataatcacagaataagaactctgtgactagatgtatgtatgtgtgtgtgtgtgtgtgtkaacacattgccatgtgagtgccatgtatcccaagtgtggaagccactgagtggctctacattttgcttctgctgtactaggacaaacttttgggttaatttcccatcaccaagcagcagacaccagctgactgtcctctaattcaattctgacattatctacccagaaacagcgtcagatcccacgggttgaggactcagttcccaagactgctccctcctgcccrctagttgcaaatttgggcctccagaacttctgactgattggcttcaagtttgactggcttcaagttggggttcccatgacctcctatttgagattgattaatttgttagagtggctcacagaattcagggaaacacatctgccagttcatgaagagggatcttttaaatgatgcaaataaatagccagatgaagatatacacagggtgaggtctggaagggtcccgagtggatgagctctgtctkcatggaggcggggtgcatcacccccaccccagctcgtggatgagctcttcttcaccttcctgtctgcctccgtgtgtttagctctctggaaactccctgaatcctgttctgttgggtttttatggaagtttcaagatgtcagcattcctttctccagcatatagggtggagaccctctctggggagggtctgaagacccacaatcagaaaggtggggaagattagagtcctgccttggggcaggcaagaaaggaaggcaagaacagacagtttcctaaggcctaagtcacccaacattataacaaaagattgtaacaagggatatgggagttatgaactgggaattgtggatgaaaacctacacacacacacacacacacacacagcacacacacacatatcataacaccacacgtcttcttactttccattatgatgaatcatgtcctggcatgtttcataatttttgaattttgagctcattttaactgagtttcattttttatttttttgccatgtaagtgccatatgtcccaggtgtggaagcctttgagtggctttacattttgcttctgctgcactgtaacaaactttttgttttatttctcactttgggattcttgcatcacactagacacaagctcagggtttcaatttctcaagacttagattttccttccagagccctgaatagagacaaagctccttacagttcccaggagctagtgggaagagcttccctagtattccttccccagggtggcaacctttataagattcccaactctatgcagagtcacagttccaggtaacctcttcatataaactgagggtggcaccttcagtctttctgggagggatgtggtttggatctgtgtccccaccgaaacctcatgttgaattgtaatcctcagtgtaggaggaggggcctggtgggaggtgattggatcatggggctggacttcctcctggctgttctcgtgatggtgagtgagttctcatgagatctggttaagtgtgtgtagcaccttgctcttctctctctcttcctcctgctcccaccatgtaagacgtgcttgcttcaccttcactttcacctttaccttcaccttccaccatgattgtaaagcttcctgaggcctccccagccatgcttcctgtacagcctgcagaactgtgagacagttaaacctcttttcttttctttctttttttttttttgagatggagtctcagtctgttgcccaggctggagtgcagtggcgtgatctcagctcactgcaagcttcgcctcccaggttcacgccattctcttgcctcagcctcccaagtagctgggattacaggtgcctgccaccatgcctggctaattttttgtatttttagtatagacaggatttcactgtgttagttaggatggtctggatctccygaccttgtgatccgcctgcctcggcctcccaaagtgttgggattacaggcgtgagccactgcgcctggcctaaatcttttttcttggtaagttacccaatctcaagtacttctttatagcattgggagaacagactaatatagggggcagtacaacttcatccactaaggctctgtagactactgtagcatcattccagctgycaatgctctcatcacttctgccattcaggaatttccttttttgtgtgaactcatctatttatttgtgatttttttttttttttgagatggagtctcacactgtcacccaggctggagtgcaatggtgtgatctcggctcactgtaacctccgcctcctgggttcaagcaattctcctgcctcagcctcctgagtagctgggattacaggcacctgccaccatgcctggctaattttttgtatttttagtagagatgaggtttcactatgttggccaggctggtctcgacctcctgacctcgtgatctgcctgcctcggcctcccaaagttctgggattacaagcgtgagccatgcgcctggcctatttttgatattttatcaatcatttctattgatacaaaaatccatgttaggtcgggctactttgctgtcagtcctcataatgtctctttcatcatggcaacatttgtttagcaacacaagaagcaacttagtaggatgctgaagataaggcttttgtgttaaagcaaatgcaacttctggtaaagttccagtcttttcagattgagttttcttctcatgacaaaaggcccttattgtctgatgtcattacaagatgggaagacaggagttgacacttcagactggttgcagcattaagccaagaggcccagtcaacacttgttaatatattattgttggttatgagtccaggtgctgtggcttacgcctgtaatcccaacagtttgggaggccaaggcaggtggatcacctgaggtcaggagttcaagaccagcctgaccaacatggtgaaaccccatctctgctaaaaatacaaaattagccaggcatggtggcgagtgcctgtagtcccagctacttgggaggctgaggcaggagaattgtttgaacccgggaggcagaggttgcagtgagccgagatcatgccactgctctccagcctgggtggcagagtgagactcgatttaaaaaaaaaaaaaagtatatatgtatatttgtgtgtgtttatatatatgtatatattattgttggctgtggtcagtgctgcgcccaataatctcattgcaaaccctttctttgctctcacctctaatgcctcccttgttatattcctggtcttattttgtaccttcatgtaagcttggtgagagtctgggccaagtcatatgtgtgtttcatatcacctatggtgtcaagcacacagtgagatgtttaaaactctggatgtttacgtgaactcctctgtaatcagacattaaaattaccaccatttgagttgtcatttcacaccgattagactggcaaaaatcagaaaaatgccgcatgttggagtcatgagaggttcgaggaactaccatgtactgttgatgagaaggtggactagggcaattccaaagagcaatctgacattgctgtcaaattaaacatatcaaaccccagagatccactcctaggtatgtaactcaaagacagtctcataaaccttaatktaaaaaaaaatatgccaggaaagtaactgcaaggtggttatgatggtggggagctggagacagtctggatgtccatctctggcagagtcaggatacaaaagtggggatacacagcgtggagttcctctacagtgctgagaatcagtaaatgtgatgaatacaaaacaacagggatasattgtttttaacttttattttaggtyaggggtacacgtgcaggtttgttatgtaggtaaactcatgccayggtgggagttgttgtacagattatttcatcacccaggtactaagcctagtacccaatagttatttctttctgatccttgccctcttcccaccctccaccctcaagtgtgccccagtgtctgctgttccccactttgagtccgtgtgttctcatcatttagttcccacttataagtgagaacatatggtatttgggtttctgttcctgcattcgtttgctaagaatgatggccgtcagctccatccatgttcccacaaaggacatgatgtcatttttgtggctgcatagaattccatggtgtatatatataccacaccttctttacacagatagatcttaaaagcatagtgcctagtgaaaaatgcaagaaaggaagtgagacatttagataaatatcatttatgtaaatttttaaaaacccatttgcaaatttattaaagcccatgtgcaaatttttaaaaactcagtgtatattgcaaaacaatatacgtgttgcaagatcgtactgaaaccaaacaatatccattagatatatgtttcctcatggattgcctataggagaggggaatggaagagaagtatgaggataaaactgaaaacatgagttaatacatatattttttaaaggagctgtgcraagggcatacatgataagctattaagccatagagtcaggagtacgattaactttgaacgcctgatgttaaaaaaaagaatagggagagaaagagaaagaggaagaagaataagaaagaggagaaggaggaggaggagaagaaagaaaaaaataaagaaaaggaaggaaggaaggagaaaaagaaaaaaaaagaaagaaagaggaagaaagagagaaagacaaagcaagaaggaaggaagaaaaggaaggaaggaaggaaggagggagggaagaaaagaaagagtgagaaagaaagaatttgttcaattaatagtctcattttcttcaattcttgcctgatcaggtcagcctcatgtgttttctggaatcctataattcttattttaatgtgtccttttccttcaactggctggtaagccccttaattgctggtgctatgtttcatttgttgtttattcttaacatggctgcagcgaaatgtagctggaagagcctggattttggcgtcaaaggagcctctaccacttattgcctgtttcatcttaggcaggtcacttcatcttctgagcctcagtttcctcacttggaaaacaagggcaagaagacttctgatggctrtcacaaggactaaatggaatttggactattgccaatacagttcctacaataggcactcagaaaatgctagcttcctctccttgattttatttcctgcaatccccaacacattataggtgttctgtcaagattttttgaacagacattaactgatgttcaccagagactggagcagaagatgatggctttagctcaagctgaaaaagaacttccatacagcatttttttaaaaagcctcaggattgcttctgagtgcagttgtgaaatatgctcctttgaatacctttagaaaggaattctctaccttcacatacgcctccacaactgcattccctggctctgtttctctgcattcagtcttgagcatcctgtgacttctcactcaccttcctccctgctggtctcttggaaaagtgctctacgtattcaagttgatttctctctcccttttgttctctgctgtctgttagagagaccataacttaacacgaggctctatgattatccccatgctggctgccaagggaaggaaccctgacaccgtaccatgcatggtggtgattttctgaggcccttagattgtttgcattcatcttaccagcaggttatacccgccttacaattatccagctgcttttataaaatcttgcattcaatgtgagagtctttaaaagctttcacatttagaacatttaaaaatccagcaggtttggacaatgaaactgactcactgtgctttgggtgggtgtttttacatctgtatgccttgtttttcgcatctaagaaacgggaatgatcttccgtgtggcatgtacacccagagggacttgaagcatgtaatgtgccctaaatagcaggtttcatgaatgtagacccactctctggcagttatggctccctgaccctctacaggaacacactcgtgctgtctcaccatttccagccaacaggatctcacagatgtatgtacttacctctttaaagtaactcaatactctctttaaaataagccagcccacccagagactaacagtataaattaagggcaaacaaacctcttactaaaatgtctgcaatacagaaatgttacagctcatcttctatatatggaaatactatcttttttgcgggggggtatgtctagttcttattctaaatctatttaggtggacagaataggctaagttgtgctgtagtaacaaccacagcatatcaatggcttaacacagcaaaaatgtgtttcttgctcatgctacatgtccaacaagtatcaatgtgctcactgtggcccctcagggacccagttgagagacacttcatctcaacataggcttctaaggtcatcacagaaaargaaaaggaatggagtaaattgcgcacttgttctcaacttgtctgcctggaggcagcttcaggcaaggcttgattcaggacacaaactataccattgtgctccatctttcagatctgcttcctctggctaatctctattcttggcttctactcgataacctcacagcacctaattcagccaaagggacaggatgattttgaatagttctcacaccagtcctgggattccctctctcattaccctggatggagtaatatagccatcctgaagggataactgtagctaggggaatacagcgcattactggctaagtgtaaggtcctccccgctcctggggctgggtatgggagtagggttgctcccatacaataaaatacaggattcccagctaaatttgaatttcagatgaataacaatttttttagtataaaaaacattcattgtttatctgacatttacatttaactgggcatcctgcatttgtatttgctattaatacaatgggtaacccttaatggaaacccctttccaaaacacatgtagggaaagggtggttccctccaatgcaatgatatgtagcataatcagaatgaaggacagtggcagcaactgtaactgttcactctagtaactatgtcagggctcgaatgggtgtaatactctcggtaggtatatatgtgtgatattgccctaaaaaataataccttataatggcatgccattgctccagttatctattggtatataacaaacaacgctagaatttagttgcttgaaccataatttattatttctcatggttccatgtgatgactgggctgagctgttcttattcagaatctctcatataagtcgggcgcagtggctcacacctgtaatctcaacactttgggaggccaaggcaggcagatcacttgaggtcaggagttcgcgatcagcctggccaacatggtgaaaccccgtctctactaaaaatacaaaaattagcgaggtgtggtggagctcacctgtaatcccagctacttgggaggctgaggcaggagaatcccttgaacccgggaggcggaggttgcagtgagctgagattgtgccactgcactccagcctgggctacagaacgagactccatctcaaaaaacaaaaacaacagaaaacaaaacaccaaaaacacaacaacaacaaaaaaaacagaatctctcatacagccgcagttctgcagttgaatatcagctgggctgtaaccatctgagggttctactgggatgaatgtcaagcatgacttacctgcatggctgggagctgcttctggctgtcacctgtgagctcagtttgggctttcaaccagagtgactacccatgrcctttctgtagggcctgggcttcctgcacatggcagctgggttctgggaaggagcatctcaagggcaagcgtttccagaggtccaggcagaagctgcaggacatcttataacttggtctcagaagtcccagagcatcatttttgccttaagcaagtcattgaggccagtctagattcaagggaaggggaatgagaccccatctcttatgtgaagagcatcctgtgtgtacagggaagggaggaactgatggggcacatattacatcatttatataaaccacctgcattttatgtgcataatgtaatttaatgctcacatcaactctgttgggtagaaactgactttgtctcattttatacgtgaggaaaccaagtcttattggagtcaaggggcttgctcaaaatcaaagagccaataattggcaaaactagaattagaacttagtcttctgattctaagttgatgctattttttttctccattgcagcccagctgtctcctcactggagtggtatagccataaaatatgggtttaagaataaagctgaaaatctaccctcctgaaggagagaatctcagatataatccatactttcctgattcctgggagtttcccatctcctagttgtttatcatatttcctgggtctcctctaggataatttaagataaaaggtgaaggacgccttagactaatataatttcaagccaattgtcgtgttgatggctgtggtagtttagattattattccataaatattcactcccatctcccctccactggggcaaggtatgcttcctcactccatcagtgttgggcttgactgtgtgccctagggatgttagctgatgtaacatgaccagacatttgaaatgtgcttatggggttgtccttctgcagtcacctatgagaataccctgagccatctggttcctaaaagatgagagacacgtggagcaggcttggacccaacctgaagcttagacccaagcccaggtgagcccagctgaagctcagcctaggccagtggttctcgactgaaagtgttttttcctatcaggaaacatttggcaatgtctagagacatttttgattatcacaactaggagaaggatgttatgggcatctagtggatagaggttacttctaaacaatacagtgagcaggacagcccccatcttaaagacttatctggccccaaatgtcaatagtgctgaggttcagaaaccctggtctaaatgagctcctagtgtagacacaggagcaaaaataagtgatttctctttgaaacctctgagttttgtgggaggttttaaaatgtagcatgattgtggtagtaaatagctactataatggcaaatgtgagaaccatgttttaggaggcaagctcagtaaatggttccttctggtgaaacttcgcaatctccctgctggctctggtccccagtcattccttctggcacagggtggtcctgcagatgagctcagatgtgtactagttcttagacaccctgggagaagaaggcaccaccttggaccccaaagattcctccctcaagctttgtgtcatcctctttcttgccttttgaagcccttaatgactctctgcctcccaaggcctgccccttcccctctctgtcacattcattttgtctgaagaattttctccagctggttattaatgcgtgtttctcctgcagaaaagctcagccatttctctcatcattccaggcttgactctccagccctaaggacmacatacccttgatggtgactcgtgttcaccaaggaaccgaattcattctgtacttttccagaaaagatgaaaaagtgttccttttggtccttcataaaatccccacatcccttaggatatttttaygtagtcttggtttccaaactgagaaaggaatcgggttctgactaatctcacraaagaaattatagaaacatttttttctctactgaacatgccatcccattttatatcagcttacctttttcacccactttgaagagtttttaagaattgaggtttaactttgcatatagcagcatgcacaaattggaakggtacagcttgataaatttttacatctgcacacacctgtgtaaccagtacccagatcaaggtctgggacatgctatcacctcagaaagccccccatgcacctttccagacagtcgctacccccacaaatctaccctattctgtctcctatcaccaaagattaattttgcctgttttcaaacttcttacaggtggactcatacagtgcatcttacaagatatgcacattggtgtcggggttcttttggtcaacctaaagttttgaaatccatctatgttgttgggtgtaacagttaaaagattctaaatggcatcttccacagaaaagaggaaggatttcataacaatttctaccactgctatttcaggaatccgtgaatgggtaaaagagagaatttaggcctcctagggaagatgggaacttgaacataggcatctacatcttcccctcttcctcccctcactcccatgataatgataagtgctaataggaggatgatcggcattggtttcagatgctaggatagcttcacctatatggcagagacttcaagatgagatgggcctgaaggtgccacggaagtcagcttccctctttccatcctaagaagaggagagagcattgtgggacaggcagaggtccctacagcagaagtggctgggcctccttcaagactggaagactgccatgatcacaaaaattccaaggaaggcatctccccagcgtcygcagccaaaacaaataaaaatccactgagacagggcatcctctgaggctgattgtctggtcaagcaagaatcctggcacacttattggcctcaacaggttgactcttcttgagtcaattttggtgatttatcctttcctagaagagcatctacttcctccatattttcagtttctaagcatggacccatgtggtctcactattgtatttttaatcagctgatgattggctggaacatgatttcagtcatgtagaatgtgggtattgaacttcctgagcccttaaatatctgagaatatcttcccgttgttgtgcataggggaatggcaacttggttgtgtgtgtagatttctggggttgcaggcttccagaaccccaaagctcaacatcgtctttgatgtctactgttaacagaggtaaagtctgaggccaggctgactttatcctttataagtaggcttttccctgagtatttatagagttcttttccttgaagttagaactttgccaggatacgtatctaggttttagtctcttttttatgaatttttttctgatgtgatttatattcttttgaaacacaggttcaggtttttctttaattcaggaacttttccctcatattgaatattacttctattgtacttgttttggtatcttgttcacagatatacattttctatgtgttatatcacattatctgtcttgattatcaccacttccctctatccttttcctctgaatcctaaggaagtttctcaggcttcttattatcactgatttgcttttctgcattgttaatttatctgttactgtattaaatgctttttttttttttttttgagacagggtctcactctgtcattcaagcttgggtgcagtggaatgatcatagctcacttcaacctcaaactcctgggctcaagcggtcctcccacctcagcttcccaaggagctgacactacaggtatgtgccaccatgcccagctaatttttaaaaatttttgttgggacagggtcttgcttggttgctcaagctgctatcaaactactgggctcaagtgatcctyccatcttggcttcccaaagtgctgggattataggcgtgagccaccacacccagcctcaaatgcatttttaaatggtttaatttctttctggctttaaactacaatcactttaatctcttttcttctcaactcgtctatgtttttgtgtcatggagtctgcactgaaaaagaaatttatgaaaagtagaaagcaaatgctgttggaatttactctatttcctgcagtaaatcattttccaaaccacatttttcctctgcccattttatgacattggcatttttcacaggcctcacatttctccccttgtttattgcttttaattgatgagagttctatttgggtctggcatgtcctcccaagcagagggcaatggattcttctagtagtttcccccaacgtgggccttgagctgggggtttttgcaagttgaggggttgagcatccttggggacacagaaggagggtgaggccacagayaatcccagccctggcttgtgacttctccacatttgacaaggtcaccatggcaggtttcaaataccttcagcttccaggccctggctggctggctgcttcctaccatgcctgcaagaattcctgctgccttgggaaatttcccctgtccagctgcaactgccacgcccctgctgctctctaaacatctggaaggctctcctgccaccctgctcttgaactcagaaagcattccttttcaatctctgattttctcccacctccaagccatctggcttctggggtatcaggaacaatgcatcagttctttctctctgtctgtctctctgtctctctgtctctctctctctctctctctctctctctctctttctcctctccacttcatacgctgacttcattctcagactccttatgttaccatgatgcttcaacccttatatcctcacaattccaagtgcaacagaattttcttttctcccagcattcccagaaaaaatctagctgtgactcattggctctgattgggtcacctgctcatctttggaccactcatcacaactagcgagtgggatgttctgcctggtttgggcatggctcatatactcacttcttgagcagagatttggatctgccccactcaaactctaaaaagaaatgttggggtatcattactataagaaggatgaatagttggtagatggcacaaataatagacatacattacagaagaattctccacttaattctgcaaaarcactctgcttcctaagtatggtagattgtgaactggctcagcagggattccatgtgaaactgggcaggttttgtactgcacaaccatgcatacctaaggggcccaagttacatcatagacactatagatttgcataacttttaccattttccagcagacggaagaagggttttgaggaagggacacattttgctaatcatrtaaatgtgccatgtagactggtgacaagtgacagtcctgtcaagatatctttactcaatattcatttccgtgacctgcaattcctttccctgagctgccagtcctgatgcagtttcttcagattatttttgcatctttaagtctgtaagtcctcagtctcctgtcttttcctagaaatagaaatcctattgctatgtaggattgttcttctgtcttgctcccatgcttatccccaaaacacataacctccactaagaaacccaactctcccctcctttatcttttgggttttgagcatttctgatgggaaagagttttgggaggtccctcctggggtagctggatttgaatctggaggagcaggagaggctgtgtctgcttccattcagtagctgaygtgtccatttggccgtgacctcagagggccctgaggagctgtactttgcaatcaggagtccaggcaaggaatcacctggattttaattctgacttttctcagycttgggcatgtcacatcacttctctgggcctttccatgagagtgcagagctgagtcatttctgaaggcttttccacgctcagatctgatgactgcaggtgtcattcaagggtaaaaatgaaaacattttcaacagatgctacgtaatctcaatggcaatccttaatacaatgtacatataatatattcgaggcactatcctaggtgttttgtatgcaccatgccatttcatctttccagcaaccccacagatacctgttaccatcatgatcrtttcataaatgagaaaagcgaggttcagaggggctaaatgacacctcgttaaaaaaaatcagttaggtttcaatcccatgactttgtttatgatttcctggtgctgagtatagtgatgaaagtaatgttattaatttccgtagttataattttaaacacaagtcagtatgaatgcaaattgtttcacaagacgcttcttgcatctttccacacgtatgttacccaaccaccgtcttctttcttcaagctagaggccttttgattattttcttctaagaaagcacctctttgtgattttcactgtagcctctcgatgagtatttgagatgattttaaagcgtaaacagtggaaaacgcgttaatatcatttcctttccagcctcatttcaaaatgaaagggaaatgtgtttggggaaaaattcacttacaagtttggccaaatgcctaaactatgcaaagagcctgacaaatggaacaaagtttaacttgctctaaataacatctccatgcctctgattctgggctggggaaagctcttacactgacccgtttgctaatgatagcccggacatcaataatggaatgtgaaagacaatcttctaatcaatttttttttyctgctggtttagattaaagcacagaaaatgcccaaatgctccatctgcttcctctaagatttctggtaggctggagcccaattatggctgccttatccatttttaataatctacttatgatcgcgcaaacacagggtgtgattatacccacatcggcttctgtttcagagcttccatttccatctataattaataagccactcagtacattggaggggagctgaaggagagatgtgagagattcttaagtaggatagcttttgcggtggttgttctttgattcactttaccaaccttcactgatgtctacagtgtgccagccgccgtgctagaccccaaaggtaaaagaataacacacacttttgccctctttaagagctcttaggcattttagaaagaatgaataagacctagtatttgctagcaaaacagggtgactatagtcaaagacaattaaattgtacattaaaaaataacgaaaattgtataattggatttttgtaacccaaaggctaagtgcttgaggggatggataccccatttaccttgatgtgattattatgcattgcatgtctgtatcaaaatatctcatataacccataaatatatacatctagtatgtgcccacaaattttttytaaaaaattttaaagaagagctcttggactatcaaaaaagatgtacaagcatgcatgttttgtttgtgatgtgagttgggcttttttccagaaaattcagctgctaagacaatcaagatgttttatgttcccaaacaatgaagtataggataattagatcactatattattacaaatataattctaagagagcttattttggaatcctttttttgtttgtttgtttgtttgtttgtttkaaaggaagtgagctattctcgggaagtagtcatttttataaggatgtgagagtagaaaaagacaaacttgcagctagacagccagggttcaagtcccagctttgtactgtgtgacctcagacacgtctcttgacctctctgagtctgtttctgtattgtaaaatgaggaaaatggttccttcactgggcttgtctgagataatgtgcatgaattcaaggtatggattgcaaagtactatatcagtataataaagaaagctcaaagtcttactgatcagaaatatgataaaaaccactttgggccaggtgcagtggcttacacctataatccctgcactttgggaggctgaagtgggagtatcacttgaagccaggagtttgagactagcctggacaacagagcgagaccctgtctctacaaaaaattaagaaattagatgggcgtggtggtgtatgcctgtagtcccagctacttgaggggctgaggtgggaggatcccttaagcccaggatttagaggctgtagtgagctatgatcgtgccactgtgctccagcctgggtgacagggcaagatcctgcctccaaacaaataaacaaacgaacactttatccttatttttctatttccctgcccagttctcccagccaaatgttacccatgctctaagaagaccaaaaccttcaccttagcgactagtatgaagtattttgcagtactcaaagtacaagttatttttcatatttgcaaactgtgcaaactgcctctaataatttttaacacaaaggggatactttaggaaagatattggggcctcacacgtttgcagaaagctagataactgaatttagtccatgttctgttgttatttgctgaaaacgtaattgcatcactgatttactgcttatactcattttcagtgttatagctgtcagattccttacatcttttatgagtcttgtgttaacaatccactgtgcccactctcctatctcaaaggcttccttcttgggccaaaggggttctttctagacagagttgctttcttagcccatcttagaagaattctctacctctgatttcaaaattcccactgctaggcttgatggaaaattccagcaatctataatctatgatttatagctgagtgaaacctacaaacattaatctccagcagtaaccgagcagtattaagtgagagtgcaggcaacaaatgcctatttctgaggcatgagagttactctgatctggtctggacctggtccgaggggatttctgacttgggcatgtaggggtgattggcagtggggtggatgcagaatgggaggggtctgagcgtgtgcaccccagctccctgamatattcctcaatctgaagtccagccacattgctcttcctcaaacatgtcargttcactctgcctcagagcctttgtactcagccctcttactggaattctctttccccagaaggccacactctccctaacarctctatttaaaatgacaattgccctcttcccttgtattagtctgttattgtgctgctaatgaagacctagctgagagtgggtaatttataaaggaaagaggtttaatggactcacagttccacatggctggggaggcctcacaatcttggtggaagacaaagagcaaagggacgtcttacatggcgtccggcaagagagagagcttgtgtaggggaactcccctttataaaaccatcagatctcgtgagacttattcactatcacgagaacagcatgggaaagacttgccctcatgatttaactacctcccactgggtccctcccatgacacatgggaattatgggagctacaattcaagatttgggtggggacacagctaaagcatatcaccccgcatacacatcagaactccccatctgacttctgcagtttatttatttatttatttttgagcaatgatcactttttactatatcacttgcttttggggaaggagtctgtctcccacctctaggcaggaattgccatctattttgttcactgctgcaatcctcaacacttacaccattttaggcaattgttggctcccaataaatatttctggaaggaaccaatgaaagccatagtcttagatatataaattgcctttatgtatcacagttatgagtgtataaaagtatgaaatataaaatatcatacatatttaataatttaatacccttaatgtatatttaacatcttayaatatatgrtagaatatatagtatatttaatatagtaatagataaatatrtatttaatataattatatatagacagacagggtcttagtttgtcgcccaggctggagtgcagtggtgtggtcgtagctcaatgcagcctcgaattcctgggctcaagcaatcttcctgcctcagcctcctgagtagccaggactacaggcaagcacccaccacacctatataatttttaaaaatttttttgtagatatagggcctcactatgttgcccaggctgatcttgaactcctgagcttaggcaatcttcctgccttggcctcccaaagcactgggattacaggcatgagccactatactcggcctataaatatattttatatatcatagttgtatatcatagttttgatatataacgttcttttctggcctctagaaccacagcccagtctggggggtccatcagagactctacacttgtgggcccatctctctacttttgtctctgcttgtggcctgggggcagctgccctgactgcatctgaaccagagttgaacccagttggctactggcatagacagaacctgtacttgctggagaggagtttcttgtttctgagaggcctggaggactgggggccataccctggaatggcagtgggtaggtgaagtgaccagaagctggaggagccaccatccccaggaccagccttggccctctcctcttccacaggcatctgagctgtcatctgagtactaaatggtacatggagacattgacagtcagagacttttagagcacagtgactaaaagaaacacaatttttaatccagagctggggagggaaactccttctagaagtcatgggtcaagggaacttaaaataatacaatgcacatctcttattgtggcctccggcatctcatgtgatatggctgctgcaatcctctgtgggcctcctacttcccccttgctcaccaccctccaaccacagtgccctctctggcttttgaacctgctgagccgcttccctgcctcgggacctttgcactggtctcctaaagagctctgctccccagtctcagcctcctctcatcattcaaacctgagcccagtatatcccattggacagacctttcctgtctgaaatagctgccccatcctgtttatgtttttcataaagaaaagtaaatgtacttgttaaatattcactgcttctctgtccaccccaactgtggtaatgtgagctccatgagtaggggtttttctctggttcatttacagctgtagccttaatgccaagtacagcacctggcacttaacaggtgctctgtaagcatttgttgaatgaataaatgaaggaatgcaccaacagaccaattaggccttcctgttttaggatctaaaggcaactgtgtgtgtgtgggtgtgtgtctcattcatgaagcaggcttctcctcagctttttttttttttttttttggtagggaatcagaagcaaaggttgcaaaccagtagactgtgggctagttggagcctgtggatctgttgaagtggtttgattggcctcccaccatgttttaagggcaaactaaccaggcacctgttatacttgcaatcccagctgttcaatatagtcatgttataccattgctatctcacacatttctgttacctgccyggctcctgcagcatgtgagcttcacccgccctggactattggatcatttggactcagagcatttgatgtgtgggttctgtagcttctactgctgtcctgtggatcagagttcattttcaggaacctggatggcaaaccagccttctcacctgggactcagccaggttgccagtccgggacatgtctatcacattcctaggctcaaggggtattcaaggcatggctgatggctttcttctttccagagaagccaagcaattttgacagccaagagagaagcatggagtggaggataaagatttggaacatctcctacggggatgaagggggcagccctcatgggcaggatctgggtctgttttgttcactgcttatgtcttcaacatccagcattgcttggaatgcagtgaatactaaggaaactctccccagcttaaggttcttcacttaatcacatctgcaaaaactgcttttcttaatgaggtcacatttccaggttccaggggttaggacccgctggggaccattcctcagccgactacagacagtcttcccagttgtcctgggcctccaatgaggcactagtaattgcaaataagcttctgtgggatcatctggattttctggtagcctcactagtgcctccaaatgaacagaactcatgacacatgtttgagaatgatatacttccagaatcttgccctttgggatagcacatcagtagacatcgttgccgatttgttcctgccttggggccatcacattgctcttactctcatgactgtgctcataaaaatggtcccccagtcactgctgttattccacacatgtgggtgtcctctgattcaatgcccctcttcctccaggatgccctcaaaaacctacctggccagggcccttctgaaggttcttttttctccctgtcttttttaaaaaataattttaacttttattttagattcaggaggtgcacgtacaggtttkttacctgggtatattgtgtgatactgaggtttgggatacaaatgattccgtcacccagagagtgagcatagtacacaacagtcagtttttcaacccttgcccccaaccctggtttgtattaatcctgtgtctattgttaccatttgtatgtcctgggatgtcctgggacccatcttctggctgcccctaaaatcatcagctcctgtgacagtgcctctgacccagcaagctgtctttgctcacaaggctcacacacaagagactgcctagaagtcccatcgatgagggccattctggctctcttagcataacccatagctctccaggccgtgcaagaagctcaatggcaattacctgccaccctctcccttcatcctttgtggttcccaacactcagtgctccacagttccttcccgtgttgagtttggaaggttctccrctctatctgaaagcccctatcctcaagttcgagtgacagaaaacctcaaatgtatagratgaacattctcttagtagagtgggaattgaagtctcaaagtaacatataaacttaaaaaccaaaaattcatgcctggctcctgcagcatgtaaactcacccaccctggacaattggatcttttggattcagatcctttgatctgtggtttgactggcagtcacccaaaccaccctgccctttcagttgaggctgcacccatatgctcagcatataatttcttttacttctggaggaggtgttatgatggatgcctgaccctcagtgactgtcttaatcaaggatcctctggctgcaaagagtagaaacatattcaaattagataaggcagaaagagggttgattatcaagttccaaggatatttcatggaaccaaacacaggaaatatgtcaggacctcatgaagaactgtacctgggaaccaagatgataattattggtttgaacacatggaagacattaactagcatctctaattctcaattctaaattcccaggagagactgtttgatgtagcttgagccaagtgtgtgtagctggtctggtccagatcaagagggctgggttattcagtccaaatgtggctgcaggggcccctcctgggggtgaaggggctgctcacagagagatggagaatgagcagagcccagagtatatctatcttagtgactgagtgcatacaaatcacatgtttaccactctcctaggaagaaggccctcaagacactgtaattaacaaatacayccaagtgctgctgttttaaaaagacaaaatagtcaggctttggctatataaatcaaggatcatgcctgtaatctcagcactttgggaagctgaggcaggaagatcacttgagcccaggagtttgagagcagcctaggcaacatagggagaccctgtctccacaaaaaaaaaaaaaaaaaaaatagccgggcatggtggtacacacctgtagtcccagctactcaggaggctgaggtggcaggatcacttgatcccaggaagttgaggctgcagtgagccatgaccctgccactgcactccagcctgggtgacgagtaagaccctatctcaaaaaaaaaaaaaaaaaaaaaagaggaaaagaaaaaaccctcatatgcacaatattagaaagataaaatgcagattttttgaaaaattaaattgcacttattaaaagttgaaacctcatttaagaagatagttttctagaaaaaaatattgactcaagaaaaactgaatattccaacaaccattggagtatttgtaaataatgtccaaaaaaaagtcctgctaggccgggcgcggtggctcatgcctgtaatcccaacactttgggaggccgaggagggcagatcatgakgtcaggagttcgagaccagcctgaccaacatggtgaagccccgtctctactaaaaatacacaaaaaattagccgggcatggtggcgcatgcctgtaatcccagctactcaggaggctgaggcaggagaattgcttgaacccaggaggcggaggttgcagtgagccgagatctcaccactgcactccagcctgggtgatagagtgagacttagtctaaaaaataaaaaaaaaagtgctgctagacccagagattttatatatgagttcatcaagtcttcaaggaaccaggctatttatgctgtttcagaaatataaaaaatatacttccttgtttattttactactgagtaactggattactctgacaacaaactctgaatacagatgcataaaatgtgaataatataggaggaaataggattcaagtaaattagcaaagataaatctgcatttagagaatttagggaggcaaggtggggggaaaatgtgtagtagccaagtaggattccttctaaggatgccaagaatgtcttgttattagcatgcctcataatataattaaagcactatagtgggtcaaaagaggggaaaatgcacaatcaaatgcattgtttttaaattaggcattgatggaagtcaatggtcatttctgaaaacaaaatcctaaattaggactagaggatggtctttaatgtaatcaagaacaattacctgactggttccttacattatgtttaaggcagcatttaaagcccagaacaacatgactgcacttatttagtattgttctggaaggtatagccaatgtgacaagacaaggaaaaagaaaaaaatagactcaaatcttgaagagaagtcattgttttgtgattagcagatgatggtattgtctgcctataaaaccaaagaaaaccaactgacaacctgctggaactaataaaagattttggcagaggggagaattcgcgcaagcacgtgcgcgcgcgcgcrcacacacacacacactaaccaatttgacaatatggtgtgcgtgtgtgtgtgtgtgtgtrtgtgtgtgtgtgtgtgtgtgtggggcagaggaagggttaattgcaacaaaaaccaaaatgttaaatatttgaataaatatgcagaatgaatttgtatgaaggctgggcacagtagctcatgcttataatcccagtacattgggaggctaaggcaggcagatcacttgagcccaggagtttgagaccagcctgggcaacatggcaagaccccgtctctacaaagggcaacatggcaagaccccgtctctacaaaatgcagaaaaattagccagacaaggtggcatgcacctgtggtcccagctacttgggaggctgaggtggtagtatcactgtggtgattgtggaggtcaaggggatgttgagccaagattatgtcactgcactccagcctgggtgacagtgagaccttgtttcaaaaaaagaaagataaaaaatttgcatgaagaaaactataaaactttactagataatataaacaaaagacctgagtaagtacagggcctggcatatacctggatgttaattctcctcaaattaatctattcattttattcaattaaatggaaacccctatgaaaagaacacgttgacttttaaagttcatctagagactggtgagaacacttggagaaaatctgaacatggagagtaggattattattttaaaacataagtttatagtaattaaaagtatagtactgctgtggaaagatcggtggkatagaagagaaaatccattttaaaaatagagtttactatatggcaaggtggcatttgaatcagtgggaaagacttatttaacaaatagtgttgagacaactggcttgccatttggaaactaattcttccctcatatataccaaaataagtctcaaaataattgcagacttgcaccttaaaaatggaaccactttttaagttatggaatggtgaaaattttctaagcatggcaccaaagacagaaaacaccaagaacaagactaagaaattggactacataaaaatgtaaaatatgtttacattagaaaatcacaaaggcaaagcagccagcaaaatgggtaatgtgatatgcaacatataaagtcgaggtgtagatatcctgaacttgtaaagatttatgacatataaacaagaaagagataaacaacctaacaagttgtgcaatgaacatgaacaagcaacatgcaaaagcagaaattcaaatggacaatcagcaagtgaaagaaaaaatacttgactcagtaggcatgaaaaaaatggagcaaaataatgatagcattttttgcagttgagaaacatggaaaggatccacttttagtgctattgtgagtgtcatttggtacaactgttctggaagaatatttggaaggatattttgcaaaagctttagactcaatcacatccagggtatgtttttagaaaacaatttcaaggaaataaagggtatatgcctatttaacctggaggatgtttagtatagttttatttgactattaaaaaatgcaaataagtgtctgatatgggagattggtatggaatactataagctctttgaaaagattaagtaaatggatgtaaacaactaatacagaatattatccattgtatatgatcaagttttaaaaggttacagaatgatgcgctcaatttgtgtgattctgcttttttaaaaaaatattacacatgcacaaaaattacacagacatacaaataagaacattaaaagtctggaaagataggctgggcatggtggcccacacctgtaatcccagcactttgggaggcggaggtgggcagatcacaaggtcaagagatggagaccatcctggtggccaacatggtgaaaccccgtctctactaaaaatacaaaaattagctgggcgtggtggcatgcacccgtagtcccagctacctgggaggctgacacaggagaattgcttgaacccgggaagcggaggttgcagtgagccaagatcaggccactgcactccagcctggcaacagagcaagactccatcaaaaaaaaaaaaaaaaaaaaaaaaagtctggaaggatctacaacacactgttaatactgtttgtccctccatggkgggaatgattatacaagatcttcattttttcctttacttattcgacgtgttatttccatgtatatcagctagagaatgcaaagtcaggaagtattctgaagccaacagcagttaastttcagatccatttctgagcctgggccctacccaggactgttgttaatttaaagataaattcatccatgaccgtgctctatcttacaattctgggcactgatttgtttccttttggtgttaattttgctgctgcagctttctgaggtccctgagctgggggcgcctgtttaactactagtcctttgtgtctcttgccagatttattcagcagtttatctagtgcttttcctaattgaataaaacctataatttcatttttaaaatacatggacccattagtgtcagtaattagacattaactagtatgaagatggcccattaatgaagcagcagttttaggaggctccactggtagagtctacaggggaatcacgtgtaaatgctgtcccttgctgatttatgatgggcctgtttgtgatcctcygaacagcagtgggacctacaatgaaattagcaatttcctaacaggtactaaacaagcagaactgcaaatgagatttatgttgttgttggaacagcccggaagcctagtgaaaaggggcgctctgtaaaactagccctcagagacagagctgatcctgactctcttcctgatagagacctccctcatctggcctgctggacaaatctttgagcaaaaggtcttccaacacccatgggaggcagcatcgtgttgtagttaaaggcatggatttagcattagatagctgtgggttcaaatccagctttgacactttctagctctctaatcttgaacaggttattgctaattacttagctggcccaagactcagttccctgatttgagattatagagcaggcctctgttaaaaactgtgttagtctgttttaatgctgctgataaagacattcccaagactgggtaatttacaaacgaaagaggtttaatggacttacagttccacatggctggggaggcctcacagtcatggtggaaggcaagaaggagaaattcgtgtcttacatggatggcagcaggcaamaagagagcttgtgcagagaaactcccccttttaaaaccatcagatctgtgagactcatttactaacatgagaacagcgcaggaaagaccygccgccataattcaatcacctcccactgggttcttcccaccacatgtgggaattgtgggagttacaattcaagatgagatttgggtggggacacagccaaaccatatcaaaaacctaagttcttccacctcctgttaatgtagatcagggaagcaaaaggagccctctttcagcacctatggtctagctcaggttgaaggcaaagcctcagagttcaatcttagtttgggtcacagactccttgagaaaattggatggaaatagctcatgtagattgaacacttactatgaagtgttatgcaaacatagtcttaaattctcacattgaatttaaaatgtaggtataatttattaatatctccaagcctacaggtaaggaaactgaggcttagagagagatttatacccccttctagggttacagaaagtggccgatgtggaatttgaacttgggccacttgactgtggcaccctgggatacgctgccctcctctgactcgctcatgcatatatcatacacaaaacagcatttcatggtgttctggaccccctgaagcccacccagaaatgcctaataacctgtgggggcaggaataattccagcattaaaatgtatccagatatgacgactgctcacccactctcagccaagccaccatcatctctttcgtggatgactgggtgcagcttctaattgattagtgctctgccctttcctctcttctgtctgtccccagcagagcagcccacaggtctgctaaagcataagtcgaatcacgtcgctcctctgcttctcatctcattcagagtaaacgttgaagtccttatacagcctccaaggtcctacacccaatgcctgttcctgtttgtctctctgatctcctcccctgctactctcttttgcctgttctgttccagcaacactggcttcctccctgtcccccggaaacaccaggtgcattctcaccttggggactgtgcattgtgtttctctcacccgaaatatttgctcctctgagagcctcatgcccagctccttcaccccttgtaagtctttactcaaactccccttctgagggaagttttccccagccaccctttgcacagtcttaacctccctggccctccatcactcccttgctttatttttgctgcttaggacttataaccacctaatgtggtttaactgttagatatagatgatccgtaacttacaatggttcaacttaagatttttcgactttatgatggtggaaaagcaataagccttcagtagaaaccatacttcaactagtcatgcaggcaccctgtttttcactttcagtatagtattcaataagtcacatgagctattcaacacttttcttataaaataggctttgtgggccgggcgcagtggctcatgcctgtaatcccagcactttgggagacccaggcaggtggatcacgagatcaggagatggagaccattctggccaacatggtgaaaccccgtctctactaaaaatacaaaaattagctgggcgtgatggtgcacgcctgcagtcccagctacttgggaagctgaggcagaagaattgcttgaacccgggaggtggagattgcagtgagccaagattgcaccactgtattctagcctggcgacagagygacactctgtttcaaaaaaaaaaaaaagaggggtggggagactttatgttagatgattttgccaaaccataaggtgatgtaagtgttctgagcatatttaaggtcagcttggctaagctacaatgtttactaggttaggtgcattaaacacatttttaacttaagatattttcaacttgtggtggatttagcaggatgtaacctcattttaagttgacaatcatctatactttgttatgcaccttactgtctgtatccccacaaaaacacaatctccataggtcagagattgtgtttcttctgttcagtctatctctaggctcgggaacagtacctagcacatagtagatgctcaataaatatttgatgaatgaataaacctggcccaatgcccttctatccacaggggcctgtgatttgacaggcaaagtctcagggaagccagaaagactcctacattgagggcagctgctagcagtaacaccttttgggttagaaacctgtgtgactccgacgccaatattggtagggaaaggattcatttccagggccagggtgggctcacctgggaggtgcaaacagacttggaatagccctgcagggaagtgaccaggcgtacatacatttcttttggtaccagtgtaacgattacagatggtgccagtgcttctccagacagtctgtttattgttgatggaaatgagatctgtatactttagatacccaacgagccaatagtacagcagacacttcgagatgaaaatttcagaacttggcttataaatctgctctctacacagaagtgggacaatcttgtgatttgtcagctgagcattaggatttcaaatggcagccctagagataaacccaagtaaaagactatttaataatctgcctttctcttctcatatcaaccctaaggatgattattccagacttattttcaaggagataagttccctccttcaatgcattctgatttttattgtcatttacccagagctttatctcctataccaaatatagcaaatgctgctcttggataatatttgatccagagaagttttgtcgggctcatagggtattttgagaaaaaattcttttattgggtgctgatttaaaaatcaaaacataccaaaaatttatagttctatctagaaaaatgaggaaattgggcaacactggaccygtattcctgcttgttaatgatcagctggaaagaagtggtttcttctttagatggggcacaccctctagggttccccaccagccccacccagcccactgcactcatctgttacctgcctggcccacgtaagtacctcaaccagcaactctgacgtggaccrctgggtgatggactgcctcattgaggatggggagagagcagycctggacctgagaatacaagattctccctaacatcatcccagagaacccaaaacctggacttatttggcaatcagcttccccacctagagccctcatgttggtttataagagtcacattgtataaaagctatttatataatgacttccagactttcaaccaccagtactgagatctctggctgaaagtgtrggctctggagccacaaagccctgtgtcaaatcatggctcaacctctcaccagacatgtgaccatgaacaagkttcttaacctttcaatgcctcagtttccttatatgtaaagtgatgataacaatatttactactgtattgggctagagttgaggattaaattattcacataaagcatctagaaaagtatctggcatgtaagtagtggtcaaaaagtgtctgctggaagaggaatcctggggtgtcagcaaaacagtctaacttcggagctagcagagtggaattcaaagcctggctccatcactccaagggaaaaccagcaccacttctctgagcctcaccttcagtatgcgtagaagcagaatctatttcacaggttattaaatgggagtggtgggagcaaaggaaaccaagaattctttaaacaccaagctcaaaggctggaacatggcagacatttaaatgctcactaaatcttatctcacgttaatgacaagtttcttggaccattttctcaacttctaaacctgtcgggtaacagataaactagattagaagagtgagagcaatgggagatggttttgtggtttcagtgcaggaatttttgaatatatagtcactgtctttgttaaactttacaaatgaccattctgggatgttgtgggcagatatcctagtctaccaggattaagcctagtctatcctggtaacctctgacagaacaaaatccatgtgtttcagtttgcttttgttgggtaacaaaccaccccaaaacttagtggcttaacacaacagccacttacggagtccagcaactctaccgactggcagtttggcttgagttcacctgggcagttctagactgagcctggtctagctggggttggctggattcactcacacatctgggatcaactagtgggtcgactgcggctgactgatggatggcagcttggtccagagtgcttgagatgatggaggccccatctctgagtgatctcccattcttcagcaggcttgcctgggcttactcaatggagatcacagggttccgggaayagcaggagggcaagcgtcagtgcacaaaagcttttcaagtgtctgcatgtgccatgtttgcgactatcctgttggccaaagcaagtctggagccaagttttgagtcaacctgggaggrcactaccagaggggttaatacaggaaggggacttcatgtagccatttttgcaaacagcaggccccttcaggaccataagccaagctagaaaactgttccttcaacttctagttgtcaactgagcgttaggatttcaaatggcagccctagagataaactcaagtaaaagactatttaataatctaccttttgcttctcatatcaaccctaaagatgattattccagacttattttacaggagataagttcagaaggtgagatttcctcctccacgtcccatctgcaagttctcagatttgtgtggaatttcttcactggcaattgcactaaccaggcttccagcaaagcctagacaccgctgtcctcaagcctggtttcccagcgatcacgtctgagtctcccaatccatgcttccatgtgtgtcctggcttgaccataggcagtgagcccatatggctgtgagtctgtctcctgggtgccaaactctgccaggccatatgctgtctggaacgaggcattattcactgtaagtgtcactgctgagagctggcagaggcacctgctggggctggaacctgttacagtcaagacagtactgggacctggcatacctccaggccccaggaagccaaaccacttgacccaatgacaaatctcctggttctcctcagatttctggatcctacattcctagaccattaaccttaaagggctgcatcgccctgtgaggctctcccagagctgagttgataaagtggtcaggactcctctgcagctgagagtgtttggagcctgagggtcaatcccaaatcacatasagggaagggcacaggggccaaggctgcacgaatgtgtcctaatgggacaatcctaatagtggccagcattgacagaacactcacctatacagtcacgtatcatttattcatggagacgtgtgctgtaaaatccattgctaggcaatttcagtgatattgttgatcctggccctgtggaggcctagggtaatgtgtgtgtttgtgtcttaatttttaacaaaagtgttcaaaaagtaaaaaataaaattaaaaaaattaaaaatagaaaaatggttataaagatataaagaaagtattttgtacagctgtacaaagatattgagctaagcgttatgatgaaaaagccaaaatgttaaaaataaatttaaaggtttataaagtaaaaatgttatagtgagctcagattcactcacacacttgttattgaagacagaaaaatacttttaataaatttatttatttatttatttatttatttagagatagagtctcgctctgtcgcccaggctggagtgcagtggcatgatctcagctcactgcaacttccacctcccgggttcaagtgattctcctgcctcagtctcccaagtagctgggattacaggtgcccgccaccacacctagctaatttttttgtatttctagtagagactggatttcactgtgttagccaggatggtctcgatctcctgacctcatgatctgcctgctcggcctcccaaaatactgggattacaggcatgagccaccgcagtgtggcctaagtgtacagcatttataaaacctgcagttgtgtacaggaatgtcctaggccctcacatttattcaccacttactggttctcccagagcaacttccagtcctgcaagctccattcatagtaagtgcccttataggtataccatttttaaccttttataccatacatttactgttcttttcctgtatttagatacacaaatggttcccaatgtgttacagttgcctacagtattcaggacagcaacatgctgtctaggtttgtagcctaggcacaagactataccatataatatgggtgtrtagtaggctctaacatctagktttgtgtaagtacattctgtgacgttcacacaacaaagttgcctawtgtcacatttctcagaacatatctctgtcttggagtgacacatgtctgtacataatattgcattcctttcttccctcccaagttcaaaaccagtcgagtcaagagtcagagtcaatggccatcaaaatgtcagctayagcaaactatgcatccgacaaaggactagtaaccagaatctataaggaaatcaaataatcagcaagaataaaacaaataatctcatcaaaaagtgggctaaggacatgcacagacaattctcgaaaaaaaagatatacaaatggccaagaaatatatgaaaaaattctcatcatcactaatgatcaaggaaatgcaaatcaaaactacaatacaataccacattacttctgcaagaatagccatcattttttaaaaaaataaaacataatagatattggcatgcatatttttaaaaaaattaaaacataatagatgttggcatggatatggtgaaaagggagcacttttatgctgccagtgtcaacgacaccactatggaaaaccgtgtggagattccttaaagaactagatctaccatttgacccagcaatcccactcctgggtatctacccagagaaaaagaagtcatcatatgaaaaagacatttgcacatgcatgttgatagcagcacaatttgcaattgaaaaaatatggatccagcccaaatgcccatcaatcaatgagtgcataaagaaaacgtggtatatatatgccatggaatactactcagccataaaaaggaacaaaacagtggcagttgcagcaacctagatggagtcgaaggccattattctaaatgaagtaactcaggaatggaaaactaaacatcgtatattctcacttataagtgggagctaagctacgaggacacaatggctaagaatgatacaatggactttgggaacttggggggaaggatggaaaggggatgagagataaaagactacacattgggtacagtgtacactgcttgggtgacaggtgcaccaaaatctcagaaatcaccactaaagtacttatccatgcaaccaaacaccagccgttccccaaaagcttattgaaatacaaaaaaaatgtcagctatatcactggtgaatgtggctgggagatatgacttaagttctgaagtcacaagagcctgctgggttagactcacccacctggtcacctgaatggctgggtgactgcaggcattccccaaagagccttctgtctgcatggatggcacagaggagcaggaatacctttgtttgaggctggctagtcctagcaggattgacggggaggattgctgaccgtggcgtgctcagcgacttctcctaaatttgccaactagttgactcaacatgagcagactggttataagtgggccgggaaatggagcttccttctaacacactaggttggcctggcgacttactgcagagtggaggatgcatgtctttctttattggctcatgagattctcacttggacagaggagaggatctgaaaatccaagagagttgtaggaccatgacttatgctgagaagggtgcaggtttgtatcagcttggatttcatccctgacctacccctaactccaaagtagtaggcaagcaaatcatcctacaggatgtatgtaagatggtgtttcactcaacatttattagcacctgatatgagccaggcactgtgctaggcatggaagtaatgaagaggaagaaggcagtgtttaccctcaaggtgttgcttgtctgaccaagtaagacaktgccgtgtaatgagtgcaacaatacgggtattacaaggtattcagraggcagagagaagcaaaggatgaattctttcttgcatagagggggataatgagggcttcttggaggaagtgatgctggtgctgatacctgaaggacaagcaggagcccacccacaagacaatgctgggaagcacgttctggaccaagatgtgtaaaactgtgttaagtgctgggagaaaccttaaatattcctgtattatcagagtccaggctgtgcaaaggagagtgtctaagataacaactagtaccagatctggaaaggtccaagtgcactgctcaaatatatttagaatttattgtgtacattatgatgtcttaaacttctgtcattcatgtagccccttagtgattttcttcatatcagctacctgagttttttgcttcattttttttagaagttcaactttttaacagtgcaggaaatagaaaacatggatcctttgttaaagaaataagaacaacaaaacccaaatgatgttactcaattctgattagacactgttgcccgctgaaggctcagagcctgagacctgccctgtctttgttaagaagggagattagtacatgttcgagtcacactaacactaaactgagactttgtccttgactaagggaggagttgaaagggattaaccagctgggtctgtgatgcagggttagttgggctcactgaccacccaaaagcatcctccctgtaagccaggtggaaacactgaaggatatgaagcgggggcctaacagggtcaaaaaaaaagaaataaatacattatggagcattttagaaggtggtaagtgatgcagagaaaaacaacaagaattgagggtaaggggtaccgagggaagggtgttccaattttagacaggtggtcagggaagtgcccccgagagagcaacatttgagtgcaggcctgaagaaggtgagggagaagccgtgtggatatctgagggaagcacttccatgcagggtggatggcaggtgccaaggccctggggtaggcgggtgcctggatgttcaattgcaaaataatcactgaggctggagtggagtaagggagggcgagatggctggagatgaagtcagagaagttaggggaacagggcagagggtctcctggcgtttgccgaaagccctgtctacatattcctgcaaccatcttagagggagaaaagttaaaaggtcagctggccgcttcatgctctgttttcatgagctgagcacccatctccataaatcagtgccagggccatctgtgcagactgcctgggctctggctgcaaactcagcaacagtgctatgtcgtcaatgtcgtcaccaacccagcatctctgtctacacaaccccaaactcaggctctgttttctgagcaaataaccagwctcactgattatttctttggattccaacagaatccaccaggtgtttcagtgtcttgtagatggcttccagagctttctaacagctaaggccccgcaggcaggactgctggtatcacgagccctcctgccttcggaactgttactgggctctccaggggaaggtaactgagctcctctgaggactgtgttcttgccaggtgttctgcaccatgcccttggaaggataaaggcagagggtggatggggtgggggtgatgagcacactctgctggggggcatcccagttggaaatccacctcagggatcggacactgagtgcaygtgacccgagtgagctggccccactttacatgagattagctgtgtctgaggtgtggcaagggaaggaaaggagctcggagctaatgagctgagttcctggcagcattaatgcggctgcacacccagcaggcattgccatccatcagtctgtcagcctctctgggggccgctggagtgtaaattaatctggaggtaccaaytccactgctgaattcttcctccaatatgtttgtgtctgaaattgttccctgggcccccagagaagataaggcagtcacttctgccttctgccatcaaagcatggggatttttcatgaccatgaaccccagactggacacaggggcttgggagggaaactgtgatttccaactatagactgggctagtcatggtgagaaagaacaagaagcctctgaaaatgcacaaatctccataaagcacagagctcagcctctgggactattgaagaacattctgctaacttaggtattggagagtaatcaaaccacatgaggaaagactcatagctgctaactctcstatcttgatttgtcttctttccaataaaagtgtgggggccgggagtagctcattcctgtaatcccaacactttgggaggccaaggtgggaagatcacttgagtccagtagtttaagatgagcacgggcaacatagcaagaccctatctctaaaaaacattaaaaaattagctgggtgtggtrgcacacctgtagtcccagctacatgggaggctgaaatgggaggatcgcttcaacctgggaggttgaggctgcagtgagccatgatcatgccactgyactccagcctgggtgacagagtgagaccttgtctctaaaaatgaaataaagttaaattaaaattaaaaactgggggaaaaaaaccttcagtaacaaagtatagacaaccaatgtgtactctgtcacccagatatatacatctgttgtctatattttctgttttacctattcgatcccctatttggctggtaccactttgatttttctctaggaagccttttgtgccatgtggcccaggctgaggagtgtacagcactgccctccccccatggagatgggctcatgacctgagctgaccactcagggaactccatgcctcctgcctgctgggatttcttcaggaatggcatgtgactcaaaatgggtgaatccaaacctccctaagatacggtctatggactctggtagaaataagtgtcttttcctctgggatcaagctgtgaggattatgtaacccaggtgccaatagacacctttgccagtcacctgaagggagaaatctgcaaaatgaaatcaacatacagagaacagcagagtcgagtgatggatacagagagccccaggaacgctgttagatctggatgggcttgagactagatgcatcgctggactttcaaagtatgtgtggcaatacattcccttgttgtttgagagagtttaaactgagtttccatcacttgcaaccaaaggacagatctccattcaaattctagctctgccaattactagctctatgattctgggaaagaacttccctcgtctaaagtcacttccctcgtctgaaaagtagaaataatcacagcacatgtcttgtagggctgctgacagagttaaaaggaacacctagggatgcccctgaccacttcttgacttcagcaggtgatttgtgaaatgctgtttcccttcctcctccactgctgagcgttgagaggacactctgcctgctgctgtgtggagcagacatttgcgctgtcaggaggagacagggctgagtccacatggtcacctcaggctccaagggctctcctgggtcctgcttcttgctcggtctctaccccttctcctgtttcctcatctcctctcagtctccagagggctccatgctctaaagagggtcccaaaatccacattaagccatattggaatggaaagagccaaaagaagccagttgagagaaagtagagcttgcaggaagctgacaggartgggaacaaagaggtcaacataagggaagatgactctcacgacagaatcctaacttcycagcaaggtgagggcaggagggtacttgggggccttggaaagctggagaagactcttcacagcatctaagagacttatgacaaaggctcgtaggttactttaattctgggcaagtttcacaaggacaagaactgtgggtcctttgctcacttctcttctcccagcattttctcaggtgcctggaatcgaacaggtcctttgtaaacatcagcaaaagaaagaagaataggccagtggctgaggcatgcaggcttcagatttgcagacagtagcctgaagcatcaggagacacagtttatttggctcttatcatgtttgtttgtttgtttgtagctgttgatgttgtttaaaaataatttgccaaaattttataactgagaaattttgcatgaaatctttatttcttacatcacattttaaaaatgatacacaaggtcaggtgtggtggctcacacctgtaatcccagcacttggggaggccraggtgggaggatccattgagcccaggaatttgagagcagtctgracaacatggtgagacctcatctctacagaaaatgtttaaaaattggccaggcatggcggtgcacacctgtggtcccagctactagggaggctaagttgggagggtcaattgagcctgggatgttgaggctacagtgaactgtgattagactactgcactccagtctgggcaacacagcaagaccccatctcaaaaaattaaaaaatgatatacatagggtttccaagagaaccttggagatcagtgagggagtgaacttagctgcattaagattcccagatcactgggtgcagtggctcatgcctgtaatcccagcaatttgggaggctgagacaggcagatcacttgaggtcaggagtttgacaccagcctggccagcatgacgaaaccctgtctccactaaaaataaaaaaattagccgggcatggtggcatgcgcctatagtcccagctactcaggaggctgagccagacttgcttgaacccaggaggcagaggttgcagtgagccaagattgtgccactgcactccagactgggtgacagagtgagactccatcttaaacaaacaaacaaaaaagaggctgggcagggtggctcatgcctgtaatccaagcactttgggaagctgaggcaggtggatcacgaggtcaagagattgagaccatcctggccaacatgttgaaactccgtctcaactaaaaacacaaaagttagccaggcgtggtggtgcatgcctatagtcccagctacttgagaggctgaggcaggaaaatcgcttgaacccaggaggcagaggttgcagtgagctgacattgtgccactgcactctggcctggcaacagagtgagactccatctcagaaaaaaaaaaaaaaaagattcccagaccatagcaacattcctgctatctgtatactccatttggggaaaattcagatcactttatagtgcttgcagaatattataaagtgccagcagatgccaattcccaagcacatgagccattcttgcctctgagaaccacaagatgaaagaaaatgattgtaaagaagctcaggaagtgtcccaccagcccagctgtatcagacaactattgtccataacatcagccctgcaactcagtctgagggtttaaaccctttcagagacagccagaaaaaattggagaggccagaatggcaaggaaactaaaaaacaggtccaatgagaaacagttggatgaataggagatatttttctgggacaaaagagttatctaagatagaagtatttgaaaagctgttatgtggaagagaaattgggtctgtgctatgtagggtgggtaggaagtccaggcatccacaattagcacaatccaaaaaataaagtgagctcttttagaaagtcactctagtggctataataactatgtaactggtttttgttttttgtggttttttggattgaaggcaaaatattacacgatggctaaactgtacacttcccttcggttgaggtttgaagtcaacaattaatgcytctcttcactttctggttctaaactaagttaaaaaaataggtgcagatggaaattaaaatataatttaacttgtattcctcatcaagctagattgaagaatgaatctggaacccaaggccaaaattaggcattccatagctactcatcacctcttaaacttgactttgggatctgcctgaaggaaaagttggggaacccacccagccagccacagaggagatctagacttccctcaccctctctggggcctcacagagaacaatcataaatgtggcttccagacccacctctagaaatcaaaacaactcggtcctgccccactgaggataaaggctctatcatttttctgcaatgggcaagtcacagagacagaggaaaagggaaagacccagggtcaagaaaggcattgagctatgcttgacccagattccactggaattcacttgtaaatrtgaattttgacatctgatacctacagggtgcttgttatgtgtcagggaccattcttggggcttcacatgatatcatgcatctcattttatctcattgaatccttgtgacaaccctatgaattattactgctactgtctctgttttatagataggaacccaaggaatagacaggttaaataatttgtgtaagaacacactagttagaggttgggctgacttttaaacccaggttcttctgactccaaattgagctcctgccgaggyagaaggaaaagcagaagcttcatttacaatagtttacggagaggatgcgggtgtttgcgggactctccgtaacttctcatcacaggattctatccataatagaaggagcttcacattctgtcttcttcttcctgagccctgggactggtcctgtagcttctgggttcaaacctttgctttgccacctttgaactggatggccttgggtaacttccctaatttcagttttcccatcagcaaaatagagaaaaaaawatatatatatatatattatatatatatatatatgtctactctcagttttatcccttgtagaaagttagtcaggctctgatcccacctagacatctatcttgaccatcactccttttgacctgtagcgtttcagccctgaaccactgcatttttcactcttttttctttctctctccctctctgtctttttttttttttaaacagagtctcactctgtcacccaggctggagtgcactggcatgatctcagctcactgcaacctccacctccccaattcaagcgattctcatgcctctgcctcccgagtagctagggtcacagacacgtgccaccacgcccagctaatttttttatttttagtagagatagggtttcgccatgttagccaggctggtcttgaactcctgacctcaagtgacccacccaccttggcctcccaaagtgctgggattacaggcatragccatcgctcccagccaacatttttcactcttatgtgacatattgccacccctcccccatcccccgttttccctctttaaggatctgtgagaggtggcttagaagaaaaagtcttgccccaactttgtttctgtaagcctccaatatagaaaaatctttcagatgtcaatgcaatccatagtccctagagataaaattgagaggaggggaaaaaaaaacaggaagaacagaattttgaacttggggctattgctcttaaatctcactctctgctagaggacctcactctatgtcattgtggatcccatttagtcctcatttttcttttcttttctttgtttttttttttgagacagaatctcactctgctgcccaggctggggtgcagtggtgggatctcggctcacggcaacctccgcctcctgggttcaagtgattctcctgcctcagcctcccgagtagctgggattacaggcgtgcgccaccacgcccgggtaatttttgtatttttaatagagacgggccttcaccgtgttggccaggctggtctcaaactcctgacctcaagtgattcacttgcctcrgcctcccaaagtgctggaattacaggtttgagccactgcgcccagcctagtccttaattttttactgaagatgctcctctgctggggataaagtggggaagactgagcagaaggttctgcagacagttacccggtccacccactgtggtcactggtcgacaaaatgcctggagtcagagatagggacagaccatctggcccagtccagctctctcagcctgtccccaagggtcaggccatcagaaatcagcctttctttcctggctcatgtgtggaagcccaggctccctcataccctaagactgagagctaaatgtacgtggcttacatgggatgccgttaacacacagattatcttctaagcaaagtagccctggaggttcattttcttttccctcaaaaccctctccaagcagctacggattctgttttatagctcaagttagctgcacaattaaacccaaagcagctcatttatgaatatgagatgccaagtttccctgcaaaacatagcaaagtaacagatgctttagagcaataaacaaattgaaatatagctttttgtttctttctctgatactaatgggcagaaaacctttcttgggaaatacaacttggggaggtggtgatgtaaaatgctgtgttcatgtctctccattggacacagggcctggatgacccatatttgaagatctacattggcccaaacccctgggcttcttgtgtgaagtgcagggatgctgccggcctcacggaaaatagacarcgtgtaagcccagctataggggagacagcttggtaaactaagtgaagacttgatttcacctccttttctcccttggctgggcacccttggccagaaaacaacttagcacaactctaagtagcgggcctgacataattatttttctaccacctagagagtgacctctgtttcatagatttgaagaaacaaaacaaattcaagaaccccaaaagggagacatttactctgttttcctttgctggcttatacttcacatttttagtgttactgtggcatcgattccacttctttttctttttttttttaagagaggatcttgctctgtcacccagggtgagagcagtggtatgatcatgattcactgcagcctgaagctcctgggctcaaacggtcctcccacctcagcctcccaagtagctgggactacaggtacacctagttaatttttaaacctttttgtagagatgaggttttgctatgttgcccaggccagtctcaaactcctgacctcaagtgatcctcctgcctctgccttccaaagcactgggattacagacacaagccaccatgcctgatctaattccacttttaaattatgagtcacaattcatcagagtccctagcagttctagtgatttatcgtgtgcacctgggaacctcccactctattcccccaaaggccatttcaaacctttcagtccactgtaaatctttggccctgctcttcagcacatgaccttgctcctgcaaatccttccatttcccactgtcttcatttgtttgggtggcttatacataacagaaatctatttctcacagttttggaggctgggaagttcaagatcaaggtgctggcagattcagtgtccagtgagaccccatttcctggttaattaatagccatcttcttgctgtgtcctcacatggcagaagagatgagggagctctctgaggtctattctataaagacactaatcccatttgctgggctctgtctccatgatctaatcacctcccaaagacctgaccttcacatatcatcaccttagggattaggtttcaatatataaattttgggatgacacaaacactcagtctatagcaccctccaaactatttacacagctgcagrcacctgtagcagacacgattggtgcttggctcagatccctcttagtcttcaccctcacatgatgaaggctgtgactcagtaggggcatgcttggcccatgaaggccgaggtgggaggatcgcttgaggccaggagtttgagaccagcctgggcaatataacgagaccccatctctacgggaaaaaaaaaaaaaaactagccaggcatggttgtatgtgcatacagtcccagctactcgggaggctaaggtgggaggatcacttaagcttctaggagttcaaggctgcagtgagccatgatcatgccactgcaagccaaaattctggagacttcataagcctggagccagccctcagtgaataacagacaaagatgtggaagataaatacaacagctttcttgttcttcagttgggacaactctagsttggatcccacactgccttccagagctcccagtgggaccaagcctcagtttcccacagtggtaactggcttaacagcaccctctttattggcttcctttctgacctactctctggtgttttcttaggtcaccttccaaatacatttattgaatttaaatccttgtctctgtgtctgcttttggagtggggacaggagaaccaaatctgaacactccctaaaccagtcgctattctttcactcattcaagcctaactgatctgtgctcttatgcccaccttttactaaggctgtgtaatctcacagatacaaaggctacttttcaagaatgtctctggcttttctttttttttttttttttttctttttttttttgagacagagtcttgctctgttgcccaggctggagtgcagtggcacaatctcagctcactgcaacctccacctcccgggttcaagcaattctcctgcctcaggctcctgagtagctgagattacaggcgtgtgtcaccacacctggttaattttttgtatttttattagagacaggtttcatgatgttagccagaatggtctcgatctcctgaccttgtgatccgcccgcctcggcctggcaaagtgctgggattacaggcgtgtgccaccgcgcctggctccrtctctggcttttcttagcattagacaccactgaccatttgctccttctggaaactatatggtctgttgttgcctgccacttcatctgagtattagtttggatgtagatttaaccaaattaatgtgggcttaactgaggcactcttgcactctctgggacagagtgaggtgccactacctcacaggttctcattgcaccttgggtgcatttccaccctaagcatttctctttgttttgtagccctttgtcttcttggctaaaacatgaattccttaattaaggcaaaaatttgctatcagcaccagggacagtgcatagaacaaacaagttcccctctctgtcaatgctgaatgaactggttgatgaaactgtataacagccgtggcatcgtgacagtcgaggtcggcccatcttcctttatgctttagccacacacagaagtgtctacctaaaaattcacatgcaaaaacttggacacactcacacaaacacagccacacatttcctaaaaatggacaaaggattaagcagagagaacaatgaaagcttcagactcacagactttggtgacaaatttacaatcaaaatcgaacttatttgagatgataataagtacggagggaagttgcgaagggcatcctgtaacatgtgccaacacttcgtatacaattatttaatcatataagtcattcactgaagcctcacaaaagccctgtaagaaatatacaggttgaccatccccaatctgaaaatccaaaatttggaatgctccagaatccaaagcattttgagtgccaatatgacaattcaaggaaatgctcactagagcatttcggattttggattttcagattcgggatgctcaattggtaagtataatacaaatattccaaaatctggaaaaaatccccaatctgaaacacatctagtctcaagcattttggataagggatactcaacctgaattgctttctccattttagatgtgtggaaactgagacttggggagcttaagggacttgctcagtgtccctcaatttttaggtgatggaaacaagatttcaacttagatttgtgtttttcactaaaatagtttccagtggggactaccctttacacattcaacaggtttctaccacaaccaggaagtgagatgagatgggagagtttgggaattgcctataaatttcctggaaataacagacttttgacaaaaatattttttaaaaaataaagtaaaatacaactgactaaattattgccttttcagcagtgactattcttaggattgacttcaagatataatagttaaccagtgaatactttcctctatttcaagattcttggcataataaggaaaaacccatgtatccttcatgacaatcttgtacaatcagaaaagaaaaaagcttcggatatctctcctttgacctccttgctaatctgaagattactttccacacaagggcttggagttaactaataattagttacatgtatatgacaacctgcccattgaaaaatggggagatatgagagatgccatttaataatcacattaataatcagactttggggttttctacaaggattttctttttaaaggagcattgctttattttttctctttgaaaccattgaaatgtttttcaccataatagaatgatactttttctcatattttacttttagggatatctaataaaccagttatttataagcttatcacagaggacaatgtgaatgttctttgtgattgcttttatcttgctgttaaagctttctttaaagagatcccagttatatacatttttgtgcaataggtgaccttcttgaggaagsctcttttaatgcaaaaacacatatatctttgttttgtcaaactttttaggtcttacccagtaccaggcactgtacaaagtacatcacacttaattattacaataatcccaggaggttaagcaccacaatttgacccatttaacagaggagaaaactgaggcttaaagaggttaaatagcttacccgtgattactcaggaggtgggcaagtagaatkagaaaccacgtcaggcagattccagagtctgtaggtttaaccaccaaactcttgggccttcctaattgtaaagagctgtcaaactgacctattgcatgagaagtgcctttccatrgattaagtaaaagttagccttaaccatccaattctccgcattcagcaactgactggaggcaccagtagacagaagaaatcacctgtgtttaacagaaaagggccagagtttgctgacatatttagctaatccacatagagcttgctgatgaggattctgtttaattagttgtggaattttaaaaaacgagcagatgtgctatggtgaaatgcattttacttcctgaaccctaggggaaagcattgggtatgttctgaggctgtgtacttgcctatcttgattgaacattcagctgcatgttttgcaagactcaggtatcctggcctggttccaacatggataattacattctgcttcagttctccctacagcttcagacaggtacgaggttaatcataactacagctagcaagcgcctactacgcatcagaacatactgagaaatttccacgcatcgtctcgaagtctttccacagttctgcagagtgagttttattttatcccctttaatggggaagctgaggctcagactgaggttaagtgacttgcctgaggctgcacagtagtaagtagcgaaacagaaattcagacttttcccttgtacgatcttcatttgaaaaaaaaaatgcacttgacccaagaagtcaaagggtgcaacaaggatataatttgtatttccaaggattaacattacaaaggattaatttaaacattaattcataattacaattaaaaaatcaattttaaaattacaaaggacttaattttttatttctttgacgtctaatgactgaatattttgcaatatttctatcttctttcaggaattatgtctcgcaataaaaaatgagtttccttccagcccttagcccttcagttccctcctcagagacccgatgtaatatgttcttatgtatcatgcagtatattctatgcatctacacctgattttctctttgaggttgttgctataagttgtttggctgaaatggactctacctctgtactgaagcttcctatttcgaatttataagtgcacagggagtaaagcagtgaagggttttgtatgaaaatcaaagaataggctgttctacacatctttcaggaaaagtcatcaagaactgcaagtgggccgggcgtgatggctcacgcctgtaatcccagcactttgggaggccgaggcaggtggatcacgaggtcaggagatcgagatcatcctggccaacayggtgaaaccccatctctactaaaaaaaaaaaaaaaaaaaatacaaaaagttagccgggcgtggtggcaggtgcctrtagtcccagctactcaggaggctgaggcaggagaatggggtgaacccaggaagtggagcttggagtgagccgagatcgtgccactgcacttcagcctgggtgacagagcaagactctgtctcaaaaaaaaaaaaaaaagaactgaaagtagtaaagtggtatattttatatatagttgggagaagtagacaataccagagtatcatgtaaaaattttgtcttccttttaatatccaagtacacaaatacacagaccagttattgtgcatatgaagtattttctgayttttttaacctaccaatttacactggcattttccctatatctctagcattttctaaaatgttattataatcacagcatagcagttcattaaatgaatgtgctatcatttaataaatattagtattatgttacacttaggttgtttctattatttcaccactttaaataaataatactaagttaagcatccttatccatctttttgcaaatatcttaatactttgacaggataaattatagagagtgccttccataaaatttaaacttatctgcaatccaaatagtgatccagaaccacactgttttaattactacagctttacaatatatatattaatatgggctaytacaattccatcccccacggctcttcaaaatgcgttggctcttttcattaatatactgatccaatagaaactttatagttattatgtcaaattcaatttttaaaatccttttgggatctggattggaattacacttgatttatagattcatttgagaagaattgatgtctgtcgaacattatgattttccatctctccagttattaaagttttaattgagttgtctacacattatagaacaatattaaatattaattgtgttaggggacatctttgccttgcctaactttaatgagactcgtagcctggagtttacggggacaggtactagagtcaaaacacttgaatttgtatcttagcttcgctattcagtaccttgggtctttgggcgggttacttctctgcctaattccctcaaattataataaggttaaaataaggctataaagttaatagtaatagctccttgatgatattctgtggtatttatatgagataatacatgtaaaagctcatatagctatgcctaccacaaggctctcaataaatgttagctattggtattatttcatccttcaatatgctagtgcctatggggttgagatggatattctgtttcacattaaagatgcagccttcctgatttcttaagattatcagcttttgtccttaatgagtaatagatgtagaatttactaagtgctttttcagaatgtgtagagatgataattttttcttttgacctatttctgcactgaattataactggattagacgcaatggtattgatcttggtgggatttggcagcttttcttttttctttttttcttttcttttttttttttttttaaattttttgttttactttaagttctgaagctcaaagccatcattcttagcaaactaacacaggaacagaaaaccgaacaccacatgttctcactcacaagtaggagttaacaatgagaacacatggacacagggaggggaatgttttttctttttttgaagcagcgtcccactgtcgcccagactggagtgcagggacacgatcatagctcactgcagcctcaaccgcccaggctcaagcgatcttccacctcagcctcccaagcagctgggaccacaggcccatgccaccatgcctggctaattatttttattatttttaatgtttttgtaattttctttgtttgtttttgtagagacttggtcttactatgttgcccaggctggtcttgaactcctgggctcaaatgatctgctgtccttggcctcccagagtgctggggttccaggcatgagctaccacacccgtccatgctttccttgtaatacattgtgctctggtagattggactcgacactttgactggtcagtttctcttgagagggctcctccgcttgtcaggtgggagtagctacactgcctgccagcgttctagcttggtgcctcaccccgttcttctctgttccctgtgtcactgaccctgggggctccctggttcaatatttccaagacataatcttccctctgctgccctaataggtgcagggcagcggcctggctgtgggtagggggaaggctctgtggatgtagctcctctttctagagacctctaacattgattgtgccttttcccaaaacgctcaccgccactggggtcactggtgcctccagttcctgagcttttggaaggttctgtgtcaagaactcactttctcttccttagtgacacctcctctcccacagccacttgagtttcagccttctcctctttcctaagtccaatgcctctcacaaatcagcctcagggccgggtgcagtgactcacgcctgcaatcccagccactttgggagcccaaggtgggcggatcacttgaggccagatgttcaagaccagcctgggcaacatgggtgagactccgtctcttaaaaaaaaaaaaaaaaaggagttggaggctgtcgtgcgccgtgatcgtgccactgcactccagcctgggagacagagggagaccctatctcaaaatgaatagttaaatcagtaaaaacaaattagcctcccttcttccaaaaatatgcctatatttgttgtctgacacaaacccttcaccatttctctttgacattttgatatttatattttttatccacttattatcaatctagtgctaatcagagagggagtggaagtaaatgctgggtttgattcagcgtgttatgtacaagttccaactatgaattggtcccttcttcttttctttctttctttttttttttttttgttgtttgtttgtttttgtttttgagacagtttcgctctgttgcccagrctggagtgcagtggcatgatctcagcccactgcaacctccacctcctgagttcaagctattctcctgcctcagcctcccgagtagctgggattacaggcacctgccaccaggcctggctgatttttgtattttcagtagagacagggtttcgccatgttggccaggctggtcttgaactcctgacctcaggtsatccgcctgcctcagcttcccaaagtgctgagattacaggcacctttttcaatattgaatgattcactttgtctcatttaatatcttttttcctaggattctactttccgtggaatttcacagaaattctacagaatttctacaggaagtagaatcctatctctagctttctttagaattacattttcctaatgtatcttcacctctccattttcatataaaatgttcctgcctctgtattctggggtggtcgtatgaacacaaatgttctcgttgttgtcattttgaaaattatggtgtttggcctatttccaacaatttttaatattaatacaatccgtcttttatacttctgtcaacttgctctaaaagttttgcttttctttttttctgctttcttatcccctgtgtcttttgttatatggccacacaattttcttttcttttccattttccagtattttggaaggtatgtatcctgtttataatagttcattttatagttttctaatacagtaaatgagtagacagtatctcttagtaaagagacttgtgtagtttttctctgtcctctctccttttcttcctgttttgccaacttttcggtctttgttaatgtggatttgatgtatcaaattattaatttttatcttttttttttttaagagagaaagggtcttactatgttgcctagactggactcaaaatcctgggctcaagcaatcctcctgcctcagccttccaagtagctgggacaagaggtgcactccaccatgcctgtctctatcttttttaaaagcataatgttgacattagaagctacatgtattatttatttggggttagtgtttgtttaaccccatcactgtccttttatatacaacttttccattcttgagcttttccacaccatcactcagaatgttgtttttcttttcaagggattttttgaagagcaggatctaatgcttttcaagatgttgcatgccataaaacttttcttttgccttcacaggcacgttagctctcggatgtgggttttatttcgttcagactaggctgaccttttaatgtaccccacatagccatcttatatctctgggaaggtctctttaatgaaatctttgcctatagctctgtccaatttgttctgggtttcttcttcaataacatcagcaaactacaagttgcctataaccactctgtcttccattctactttctctctcatcagctcaatgttgtgaattttattttagaagcgtaagatcaggctccggtttgttctaatgtttatttttgacatcgctaattctgctctttactgctgtcagcgtagttgtgtttcttttttattctttttggtactagcttacttcacccataccttgatttttctggtcttaactgtgttttcatgtcatcttactgtcttttctctttctttcttttgttttctttcttttctcttctttctttttttcttttgttaattgagacagagtcttgctttgttgcccaggcactggagtgcaacggcgcaatctcagctcactgcagccttgacttcctgggctcaagtgatcctcccacctcagccccatcaagtagctgagactacaggtatataccaccatgcctggctaatttttgtatttttttgtagggacacggtttcaccatgttgcccaggctggtctcaaactcctgagctcaagcaatccagtcacctagccctcccaaagttctgggattacaggcgtgtgccaccacgctagccttgtctttttgcctaagcctatgctcaactcttgtccttctgctyaaatgtcccccaggttttctctgatcacttaatttcctcattacacttrttctctttcttttcctttatcacaagttgtaattatttttttttattttgcccattatctcctccaccaaaccagaggccccatgagggcagcaagtactacatctatgttatttatagccgtgacttcagcacttagcaagatggctggtgaagagtgggtgctcagcaaatatttgctgagtaagtacatgcccatattactctggtttggattccctttggctgcaccaatattgttttgagtcagaggctcccaaactttagtaattgaaggaccaactttttaccatattcaaggacttagactattattttcttaatatttgtgtttagatcaatttacattttctaccttcactatgtgtttaagcttcatcctaaacgatgaagttggttaagtaaaagtgatgacctggttccaattttctaaaatacattaaaataagcatctttgccttgcctaactttaatgagactcgtagcctggagtttacggggacaggtactagagtcaaaacacttgaatttgtatcttagcttcgctattcagtaccttgggtctttgggcgggttacttctctgcctaattccctcaaattataataaggttaaaataaggctataaagttaatagtaatagctccttgatgatattctgtggtatttatatgagataatacatgtaaaagctcatatagctatgcctaccacaaggcatgtaaaaatgtaactgtaaaaaatgtaaatttcatccgtgaatcacttgtgagccacaaagacgataagtaaacacactttgggaaattctttctaaagatctcgggctactgcatttcctccaggagctcacgtcttcttgatttaggctttgattccttcccatcttattcatttaacaagcacaatatttggtgggtatgattcattctcttttgcctgcctatgatggcatggcacagtgacaaggactgaagataccacagccagcaagcaagacactgtgccttcctgatggggttcacagactaactagggggaaggcaataaacagatatgcaagataattacaggttgtgcttagaatgatgaggaaataagccaaataaaccacttcagagagtgacactgtgccttcctgatggggtccacagtctaacctgaggggaaaggcaatagataaacagagaggcaagataattacagatggtgcttagagtgatgaggaaataagccacttcagagactgacatttgaaagtggtgatattctaactgagacctgagcatgagaaggattgagccacaggaagagccagggtaaagtgatccaggcagaaagaacagcacagccctagagacagaaagggaaaggactgggggattcaagagtgtctgctagttcatcttgctgggttttgcaaatgccttccagaactgacatgcagagctggaccattctataccaaagcctagaaaagaactcacatgtgtatagtttaggcaggctttgaacctgcaggagtattagtgacccaacaactacccatgtggttttaggcacatctgagacatgaattatatgtaggcagctgacttcccagtgcatggcccttgctccctctatgatgagaaaaccaactcctgctcaccccttgcaatcatggagcttaatgtatcctggtacgacaacaacattcgggagtcagatggaaagcattcctatcattggttaatttcctccaaggaggcaacaggtgttggctccaaccactgcaattggatcacctccaactacccactagggggcgctgctatgctgcaagaagtggggcaggcttgcggaactcatccctgcaaaaccattaatacccccgggagactgaagtgtgaagttgtaaagcttggtgttaacaaacaaaataaactcactgactcatgcagttgttggctgaggagtttgcctgggaaacattcagatctggtgggaaaggatgagggtgcagatggtggagggtggggactccgtggacaattcaggcaggaaactgggaggtggaggaggtttcagagcagggaagctggcgtcaggaaacggctgggttgaccggctccatactcagcctagtgctgggcagaatagaaaacgttatgtgcttagtagcaggatattgagagcactacattctaatggtttctatattctctgtggaatgggatgcaaggtcacctactaagagtggcaagaaagggcagggtttggtcatttgcagagaaagggaacggtctgaaatagtcatgcagagctagaaagccagttgtccagagacacatggtggaattgtgctgtgtgctaaaggcccctgaattagtctgttctcatgctactaataaagacatacccaagactgggtaatctgtaaaggaaagaggtttaatagactcacagttcagcgtggctgaggaggcctcagaatcatggcgaaaggtgaaggaagagcaaaaacacgtcttacatggcaacaggcaagagagagagcatgtgcaggggaattcccctttataaaaccatcatgtctcatgagacttattcactaccatgagaacagcatgggaaaaacccaccctcatgatttaattacctcccaccaggtccctcccatgacacataggaattacgggagctacaatttgatatttgggtggggacacagccaaaccatatcagccccctttgtgttggcaatcagrtatctggagtggaaccagcctttgatttcaggtgttctccagcagtgctctgccctgctgagtatagagagagggcactcaggtgctcctggcacccagtgttgcctcaggaagcttcttgcacaggtccctggccctttttgagggtctcctgcaggtactcagggatgatctgtcattctctctggaggtggtggctccaaaatttctatatgggggaaggggtaggagtggccccatcagaggaaggatagaaagcttgtctgggagttgccatgcatsctgtttcgtggcatgcattcactctgattgactaatggagactagagggggataaagatccctttggcctccacttggtaccatcactgtccccatgtgccattttgtttcctggatgctaatgtcactggggaacatctcacgagagcaagctgactcaggctggaagctagaaagtagagcctagctagagayaggcactgggctgctccccacagttctgatcatgagtgaagagagctgtggtgggtcctgagctggctgggacagacgtcagaagggagtgagtgagaggtcaccaattgaatttggttatagattagacatgggtgttgcttggacaactggtgaatggtggggccattaactgagacatgagaagtggtaagttgaggagaaataactgaagtgtgtatggagaaagaatggtcagtggggggcaggggcggggaggaagaaagaatgtgttcccaaaggaagaaaaacaagtttcaacaagcagggagtgggcaagtgcttcagaggccacagaaaagtgaaacatgaccaagattcgagatggagttggcatttagggttgtgttcggagagtaccgcttcagaagacgatggggtgggaggagatggagcaagaggaggatgaatgtgaggtgaggaaatgaagccatgcagctttattccaagaactctggctgggaagaaaaggagatatacaggactgtcgcaggagcaggtgaagggatagatagctggtttttttgaaaatgaaaaaggcttgaactaaagggggaaatcaagtagagaaagaggaacctgctaatagatggtcacggtgcattacactttatacgggactctcgcagctttgacctcacaacagccaagtgaagttggcattaccatgatccacacattgcaggtgaagaaactaacacgaaagtcacatggccaggaaaaggaaaagctgggactccaatccaggctttctgaattcaagtcatccgcaatttttcacccaacatcaattagccgattctgattaatgcaataaatattcactggctatgtcctttgtaccagtattgccagggctgccttaagaccttgcaattcaacgggtggcccaaggagcagcaagtcggcctcactgtggagcctgctaaaaatgcatactcttagcaccccctccctagacctactgaatcagaaactgcatttcaacaagacccctacacgagattcaaatgcacattaaagtgtgacaggcacaggcttatggggtccacttccagggagaagggagggcagggagagaarttaagcccagaccacagaagaagagatatcctgggagttacctccagatagtgtcccacggtcagctgcagataggaccaaagaaattgaagtccaattgcctggaaatgtatcagagctgtacatgcagcagcaaaaacattccttcaacacccacgatcaccgttcctcctttccaagagagcttcttgagaaaggagctatacattttcaccttccatatccttccttcccgcccacacctcagccactccagacatgtttcctccccctcactccacagtagaggctttcttcatcctaaataatatcaatggagacttttaaaaatagcttttcattagatagttttttttaaatgacaaaaaatacatgctcatggcaaagagaaaaataaatccgaatgcaaaaagctaaaggtgaaaacgaagtcccattctacactacagcccagcccagatcccccaaggttattttccaaagataataactgttaaatgtattgtgtatccttttagaagatgtctatgcatataggcactagcacgcatgtgtatattttgtatgtaaatagggacatattaaacttactgttctacaacctgcttttttcacttaataatatgttgattcctttaggtgtcaatatttgtagatccacctcatttcttgacagccagatcataatctatcatatggcctcactgtggttctgatagaaatgtgggttgtttctggtcttttttttattacaatgttgcagtagctaacttaatgctagctgctataacaaacaaacccctaggaaaagtttatttcctgcttagacaatagtccaggggtgttgttttctagttgtaggtatcctcccataccctttctaccttttggacctgccctccgggaacaatctatgcaggtgtccttgggagatgcctcctcatgtcaactgcaaatactgcaatgaacacctggcacatgagtctttatgcacttgtgcaaatacatttccaggagtggaattgctgggttaaagggtatgtgcattttacattttgatagataatatataattgtcttcctaaagactgcatcaatgtatatgtctaccaaaattaggagagtgttagttcttcacattcttgccatcataattgttacaattaaaaaawttttttttccagccttacaggtgaataatattatctcatcatgattttagtttgtgtttccttaattttagagatttatcttttcatatgtttattttctattcatagctctttattaactcttttctcacgcctatgatcctttcttctactggctagttctcctttacttattgatttgcaaagtgtctggaaaaatatataaaacataaaaagatatgaaaaacagatatgaaatcagctctttgtgtttatagtgtaggtgctgcagatatttttccaattagtcattttccttttatttatggtatttttctattccagggacttatttttttttaagagtctaacttttccatcttttccttcatgatttttgtctcatgcctagaaaggctgtcctcatgccaagattcatttttatattctcacgttttcttcttgtgtgagagtcacacttgaatctggattctgcaaactggctgtgttgctttgctgatttactttagttctctgtgtcctagtttcctcagtacaaaaactggaatagcatgagttcctactttgtagggttattgtgaagatcaagtgagatgatttagagtttagaacagcaartggcccacagtcactgcacaataagtgtcagctattgtcttgtttatgtccaaagcatcgatgaccacgtgtatggctgatgactgctgcgtacccattttttatggttagcaagtgacaagactcaggtctttttgattccaaatcctgtactcatacccagccattaaactagcctgtagctgaaagtagctgaaagtggatcataactgtcacatctctatattggcaatgcttagtcctgtgcctggcatgcagtagtgtattcattcccgaggcaagtgtttrctgggcacctactatacaccaggggtacaaagataagcgaggtgcagtctctttgctcagtggtcctctatgtggacataccatgtaagaaggatccctttgtagtctccacttgtcacacagcaggactagggataaattccacaatacacaaggggtggataaaggaataggctttactggggaaacttgcaagcygtgggtcacaatagaagaggcagaaggacagcattaccctttcttctcaccatgtcattgaggggactgccagggcctggaccccatgtggtttatgcyccaaggatgaagggactctgccccttcagctttatcaacttccctcttatagcgcagggattagagcagccttgtcagtgarggaataatcaaacaactggctgattggatttagataccagctatttacaggagttatctgggacacccagctgcccagcacctgaatacctgaggacctatgagaaactgggttcagggataacctttcccaccagaggaagaaagctaccacttctcataggaagccaggtttaggtgcagccctcacactaggaaaaggggaccctgccacctcctgtcccagttggtccacaaaactgttaactctttgaggaaagagactgcagctcacttatctctgtatccccagcatacagtaggtgctcaataaacgcttgtctcatgaataaatccatgattgcataccagcagaggactagacactgtcaatatagagatgccacagtcatgatccctgccttcagggacactgaactctagagggatgatagactcagataatgtatcaaaaatgggttaygtctatagtgggtaccatggaatcacaagagtaaaaaaacacctaactcctccaggaagggagaaataataagggcacagtcagggaaggctttatggtggaggtgacgatgagctgagagatgttttgccaggyaggttaaggagggcttcatgcaaagggtacaacatgtcaaggttcccttagcatgaaaaatacagtttttggaggagtacagactggcttcaaataatctagtctagccagagcccaggaggggccatgggcaggatcaggaagagccacagaaatcctggtaaagactctatcttgtgagcaacgagaatggtcgctggagtatgagctgagacttagtggcctgctccaggttcacataagtataaggatttggggctgtggacttggaaggaaatggtcccacggtatgagagggggctcatgacttcgctcaactaggmgaggataaacggccacaggtgctgtgcctgccacatggctcagtgtgtgggggtttagcaggtttagttttaagaaccagtttcttgcaataaggccttttccctcctcttccgctcttaattatctctccggagactgcaatgattttcaaggagcttggttgcccagttagaagccaataaatcaccacaggcctccaggcagccgggtcttccagaacacatataaagagtgtacaaatttagcagaaaatgaaatcttccagagaatcctatcagtaataatcagtggtgtgccagttctgtaagtttccgatgatggcccgacatcaggcaggttcccacttgcttgcatgtgcaagggatgacccttgggtggacagtgggttccaagggagctgtcctgtgttccactgcgtagcccagtgtgggtcaaaaatataatttccagaaagcctcaggatgacaagagaatacttgggtgtttttttgtgtttgtttttttttttttctctttttttggaaggggctgcaggaagtctgtgatgtttcccttagggtgaaagagtatagacttttatagcatgagaaagagggacatatcttcaccagtacaaacaatatgattctgcctcattgttccaagattaaagccttgtctttattattttttctcttctgcaagtattttctgaacgcttactaagtaccagcctttgtccaggtgtagagaatacagcagtgaataatatagacaacaatcttcactctcaaaatttaccatctaccgtgggatgggatgggtgtggccagggacagtaaacatgcaaatcaacatcaaatatattaggtagtaatgagtgtgcccctgttacttatgagaataccttttgttaaggtggtatgctccaagcttctctgatcgtaagaatcatgggggagcttgtttaaaatgcatattcttgaactgcaccccaaacccactgaaattggaatgtacagaagagggacctgggaattttttctccaagacgcacccagttaattctcatgagcaattgtattaaaggacacgtggctaaaggaaggtgcagtctgccacagtggttctaagcactggtggcccactggaatcatctggagagttttaaaattgcaggtaccagccgggcacggtggctcatgcytgtaatcccagcactttgggaggctgaggcaggcagatcacgaggtgaagagatcgagaccatcctggccaacatggtgaaacccatctctactaaaaatacaaaaaattagctgggcatggtgatgcacatctgtaatcccagctacttgggaggctgtaacaggaggatcgcttgaacctgggaggtggaagtggcagtgagccgagattgcgccactgcactccagcctggcgacagagcgagactccatctaaataaataaataaataaataaataaataaataaataaataaaatttcaggtacctgggcctcgtgcccagagtttttgatttaattagtctgatgtaggacccagacttttgcattgctccaaaaccccctcaagtggtcctggcatgcagcttaacttcaccaccccttccccaccagccacagggcagagccttgggctagagacagtgtacaggtggcaaaacagaaatggcatgagacgttcctttaaatctcattctaccttcctacatttggaaagtttggtggaagtagagcttggactccccctcagtcgtgagccagagcccctgtgggcacaatgaaatcttgaaaacaacagaaaatttccctccagtactagctgcccaaggccagaatgctaaaaaagggctgagctttataaatcagcactgacaacttctgaggactcaagggccgcttctcaatgggcatctacctctgacactggatctttgatccatttactgagcacctatggtatgccaggtatgatgtgagggagggagaaatgaacaagaaacgtgcaagttgctgaggatctgtggtataaatggatgcataactaacaattcccacacaagggcatgagggtgctagtaggcggttatacaaagtgccatgaggttacacaaagaagggtttacagagggtgtgtgtgacttttggtttggatttggaaatgcgagtaggcattcaccaggacaagagacaagtaagatggatcagagtcttaaaaaataaaaataaaacacttggcaagtgcaaaacacatatgaaagggcaggttcatgtttggggagaggattttatgttcagcatggcatgaacatcaggctaccaaggaagtggcaagagattaattctagaaaggtagacaagggcctcaaatgccaagctaaggaatacagaccttattcaaaagaatcattgatgcctgacttaattggatttgctccagaaagcttaggatacatgattggattccctggtggacatgaaatgcagaatgaattgaaatgggaaaaaacartaggagcatggagggcagagagaaatctgtggtctgaggaagagwtgacaagggcctgtggctgttttcatggactaagggaggaggctggagacttcagaaggttggggaggtaaaacttacaagaacgaaagacactggatttgaggaagagttaagaatgattctgaagttttcctcctttcatgatgatatttgcaaaagcaggcaaaagagagaaagaaagaaatttgcaaaagcggaggaaaatgttcaattgttgaagtgaggtatccagtctatagacaagcattctaattaagaacataggaaagctttaagttggagctgcagttacagatttgtgtgtcagcatctcttaggtgatggttaaaggctggggaaggaatgaggtcatccaggaggatcacatagaatgacagaagtgggcccggctgcagtggctcacacctgtaatcccagcactttgggaggctgaggtggatggattgcttgagcccaagagtttgagaccagccagggcaacatggcgaaaccttgtctctactaaaaatacaaaaaattagccagacacctgtggtctcagctacttggggagctgaggcaggaggattgcgtgagcctgggaggtcgaggctgcagtaagctgagactgtgccactgtactccagcctgggagacagagtgagaccctgtctgaaacaaacaaacacaraccagcatgagagaagtggaatgtaggccattgagaagatccagaatggtttggggagagttaggaatttgtaaaggggatgagggcttcaatgagtaaatggattagataggttgttggcttcatttaaacttcaaagataccgataaagatcttacttgtgccatggattgtggtggactcgggagatacagctgcaaataagatacaccctgccctgccctcatgtaatttataatcaagtggggtgggtatagcttcaacagaaaataagtgtcttagtccattttctgttgctcataacagattacctgaaactggataatttataaagaaaatgaatttatttcttacagttattgaggttgagaagtccaaggtcaagaggctccatctggtgaggaccttcttgctgttgggggctctccgtagagtcccaaggcagcacagggcattacatgggaaggggattgagtgtgctcacttgctagctcagttccacttcttataaagacaccacttccactctcatgataaaccactaattcattaacacattaatcctttaattcattaatccatgaatagatgaatccattcatgaaggcagagcccgcatgacccaatcacatcttaaagtctccacctcccaatagtaccacgttgaggattaaatttcaacatgagttttggaggggacaaatattcaaacgatcgcaagaggccagactgtaaaagataggttaaaattcttggattgcaagcaacaaaaaccaactctaactaatttaaaatagtagaaacttactggaaggatgtgtagtaactcacagaatccagaagaaaggggaagagccaggtctcagaaagggcaagaacctagatagctgcagggatttggcaacagaaactaatgaggaatctcttccagggttttatatctgattggaatttcaatctttatgacacctttttagtctttgtaacacaattggttcctaatagcctaactttggacatgcatccccacccttggcccaycaagattttgtccaaagcaggagtagtagtcctcaaggaaaaatctggggctgttaccagatgtagggaaaatagttcctgagcaatttaaaataacagrtgggaggaaagtccaaacaatgagcattagattattctttcagtaacttttgcagagctacatagaaaacaaaggagacagaagcttaaaagggttgcagggtgagagaaaagttcagctgtttgctagcagctggaaacaagtaagcaaaatttaaacagtgacataaagaagaaagatgagccccaaggaagtctaatcacgtcttcctccaatgtgcacagggcatgggaaggtatacacagtamctttgcacgttatcatcacacaggactccaacactctattccaatgacccaaggagaaataaatattcaagggtgttttttggtgggatagagaaaatttgaagtacccaggagccctttgacttgtggcatgactacagcatgtttgcaacctgattcttatatcttctttagtatttgccatttggttttgcaactgataacaccaattagaaattagaagggtgggccgagtgcggaggctcatgcctgtaatcctagcactttgagaagccaaggtgtgcggatcacctaggtcaggagttcgagaccagcctgaccaacctggtgaaaccctgtctactaaatacaaaaaattagctgggcgtggtggcacatgcctgtaatcccagctacttgggaggctgagacaggagaattgcttgaacctgggaggcagaggttgcagtgagctgagattgtgccattgcactccaacctgggcaacaagagcaaaactccatctcaaaaaaaaaaaaaaaaagaaagaaaagaaaaggaaaaaagaagttagaagggtggagcttcactttagtgcacagatgggggaataatgtgatactttggagatcactggatttggtcagcattttccaaactggtaacaaaaagagatgttaattggtgcttcacagctctatagtcaagtaagcttagaaaatctgtcctcaattcctttcttggatattctttagtgtattgaaggatattgcaaaggaatctgtttaatggcaagtcaagtcaatttccttgtgccagggaagacatttattgcaacagcccctgtagaatttgggaagtctttaaacacagtttaaatgcgctgttacacttatgtaatttcatctattcctgtcatacaggccaacacctgattaccatatatgccacagtcacgatctaatatatccagatttctaagaaaatccagccaaagaattctattcaagtgcccttgtgattgtttgcacataatgcaaacaatgtactcaatactactttttttaattagttctactcaattttttaaaaattgttttttaattgtctactcaatactaacaaatgctattaattgtcctactcaatactaataaatacgatttcaactttcaaccaaaaagggtctacatagactttgggcctagaagaaaaagatcagttgtatcagtctagcaatgaattagaaggttcaaggcgccaatgggtgggtttgcaggaaaggtagaaggggaagggatctaagcacaggtggatgggtgagcccttgcataccttgttctcggagactagcaggaggggctcaggatggttgcacataaggattagctttaagatggaggagaggcaggttgaaggagttgaggtgttaggttgaaagcttatgcctttctagtgtcatgggtgactagctgcatgttaagggtggatgaaaggattcaggctgggagtgtatgatgagaatttgaaacatttactatgaaaaatgatggaaagggcctgaaaagacaaatataagatcactgagcagtactgagggttcaatggaagctagaatccatgaacatattaaggatatatttgtaagtgacagcaattttctccagtgctgtttggcaacccagggacagaactggaaaggataaaaggctggaaggatgcattattagagactggggagagcaaytagaacaggaaaattgatgaggatgaagatgatgctattgaaatgattgttcattgggtacagagaaggtatggaataaagtgaaatcaagagaatcccagatgaatttgaaaatgggtataagaagtttgagactgtggaaaaggtagaaagggacaaggttgtaatctgtagtttcctgtggctaccataacaaattactgcaaactaggtggcttaaaacaaccaaaatgcattatttcacagttctagaggatagaagtctgagaccaaattgttagcagggttggttccttctgactgctctgagaagaatctgccctgtgcctctctcctagcttccggtggctgctggtggcaatcctaggtgttcacgtcttgtagacatcttacttcacactctgccttcatcttcaggtcaccgtatttcctgtgtgactcttcttcccttctctaacaaggacactcgtcattgggtttatggcccactctaatccgggatgatctcatatgcaagtccttaacttaattacatctgcaaagacccttttgccaaataaggtcacgttcaaatgttctgggtgggctgggtgtggtggctacaccgtaatcccagcactttgggaggccaaggcaggtagatctcttgagcccaggagttcaagaccagcctaggcaacatggtgaaaccctgtctctacaaaaaatacaaaaaatagctaggagtggtggtgagtgcctgtagtccaagctacctgggagttctgaggtgggaggatcacctaagccaggggagtttgaggcagcagtgagccctgatggcaccactgtactccagcctgggcgacagcataagactctgtcacgcacacacacaaaaaaccccmaaacagaacaaaggttctgggcggacatatcttttggaaggtcaccattcaaacctctacatagttttagagtgaaatttctgagttaaccatttcagagttagggaaattgcaatgacatgacccaacgtatggccatgaaaaagagttggtgaagggaagagaaaatggaaatacttggagtgtcaaaggtcaaagaactgcgaggccagggtattgggtggagatagtgataggagccaggaagcagaaagctaagaaccaggagttgatattccaaaggatgtgagaatgaatgttctgggggttggtaaatcatagtgttagtgatgcagggcaggcgagccttggggagttcttggctttgcccaggaaacaattcaagggcaagccggtgttgttagacaagcaacttttattgaagcagcagtgtacagcagaagcagaggcactgctccctgcagagaagggctaccctacaggggtgttgtataggcagtgtatccagtgtagcagctcggaggcagctctgcagtcatatttatacccacttctaattacatgcaaattaaggggcagattatgcagaaatttaccaccctacaaaaagggtggtagcttccaagtcatcaggttgttgccatagaaagggatggtcacctcggggcgttgccatggcaatggtaagctgacagggcacacaggtgggcgtgtcttgtggaaagctgcttcttccccgccctgttttagctagtcctcaatttggtcctgtgtccaagcaagccctgcctccggagtctagacccgcctcctacctcattaggattgggaaaggtgtttctcaactctgccttcccattagaatgagctgaggaactttatagaagtatatcccttccctgaatattttgaatcagttgttctaggacagagcccagacatgtttatttaaaaaagaaagaaagaaagagaagaaagaaaggaaggaaggaaggaaggaaggaaggraggaaggaagggagggagggagggagggagggagggagggmggraggaaggaagggacttctcgggtagttctaacgcgcagccaggattaagaaaaatgcacgtaagggtcaactatgaccttcatcaagaagtagcggttgggaaccagggrtgctcccgtccatcaaggcctgaatgagatgctcctgggaaagagacttcagtgcttcctcccacatcccttaaggtctcaagcagagccaggaaattaaaaagcaagggaaagagaggttacatagcctgactcctgactgaggtcccaagcagcctggagttctgtgcttgttcaagcctacacaaaggatgtatttcaaatgtttttcagcagaagacgtcagaactcatatctaaaacagttgctattcctgcaagacaagactttttccccaaaaaaagattttcttaatatatttggagaaatatcttttgccagaacaatattcagtggcttactttgtaatttttgaatatgtaataaatgcattaaaattttcaagcagcttaaaaggttatacaataaaaagtaattcttagccaggtgcagtggcttgtgcctatggtcccagcactttgagaaaccaaggcaggaggatcacttgaagcttggagtttgagaccagccagggcaacatagtgagaccctatctctacaaaaaatacaaaaaataagccaggcatggtggcttacacctgtaatcccagctgctcaggaggctgaggcaggagaatcacttaagcccaggagttcaagaccaccctgggcaacacagtgagaccccatctctacaaaaattattaagaatcagccaggagtggtggcatgagcctgtagtcccggcttcttgagagattgaggtgagaggatcaatggagcctggagttcgaggcttcagtgagccatgattgtaactctgcactgcaccttgggagacagagtgaagtgagaccctgtctcttaaaaaaaaaaaaagcaattctcatttatccctcatcttctaattctgcactcacctcaagtttcctccctagaagcaaccacttttattggtaacttatttatccttcttaagatatacaagctgtatcttgcctgttttcatttaacactgtatgttggaaatcattccatattaatgcatacagatctacctaaccctattaattggctattccacaatttatttagctcactgtgatggatgtttagattgtttccaggcttgaagcaaacaggttaaaaattaaataagaaaaaaagcctgtaatcccagcactttgggaggttgaggtgggaggattgcttgagcccaggtgttcgagactagcctggcaacataatgagaccctgctctacaaaaaatagaaaaacttagccaggcatgatggcacacacctgtagtcccagctacttgggaggctgagatgggaagatgggaagatgggaagatgggaagatgggaagatagcctgatcccaggagttggaagctgcagtgagctgtgattgtaccactgcatttcagcctgggcgacagagtgagaccttgtctcaaaaaaaaaaaaaaaaaaaaaaaaaaaagagaagaaaagaaaatcaacaagatttaaagtgagtacctcaccaggtgaaagctttgagtggaacagaggccaggaggaggatgcaacaggcccctgggtggaagggctgatgtagctgggcctgaggcctggccccagggaaacctatttgatgatgtattccttctgcycacacaggagcctgatgcccaggaccctcgagagccagatcacgctggagaagacgcccagctactttgtcactcaagaggctcctcgacgcatcttcaacatgtcccgagacaccaagctgatcgtggttgtgcggaaccctgtgacccgtgccatctctgattacacgcagacactctccaagaagcccgacatcccgacctttgagggcctctccttccgcaaccgcaccctgggcctggtggacgtgtcrtggaacgccatccgcatcggcatgtacgtgctgcacctggagagctggctgcagtacttcccgctagctcagattcacttcgtcagtggcgagcgactcatcactgacccggccggcgagatggggcgagtccaggacttcctgggcattaagagattcatcacggacaagcacttctatttcaacaagaccaaaggattcccttgcttgaaaaaaacagaatcgagcctcctgcctcgatgcttgggcaaatcaaaagggagaactcatgtacagattgatcctgaagtgatagaccagctccgagaattttatagaccgtataatatcaaattttatgaaaccgttgggcaggacttcaggtgggaataagcccacgaaaggaaagggctctcaagggctcttctgctcatctcttccgtgagatttgctcccagaccctctkatctccctccaacaaaccctggctccagccccctttcccaacttgagttgcatcatcttggaaccaggaagcccagctaaagccaagagaccagagagtccctgccactagttttcatcagtctgttcaagcaaagttgatctgctcctggcacgtccagtaaattccagaatcattctcctttctgcccataaagggccttggagaattgctttaagaagagtgaatgttccaatgatgatagatattataagcgaygatggttctgttgctatgaacacagcagtcggtccctgtcattgtccacccaggagtggccttgttaattccaagtggcatgtatcttccctctgagcttcatttcttcaagatgctctgggtggtgggatgggagaccatcctcagccctcctcagaccttatcaattcattgagagattgcaaagctgaaagcacctccggccactcctgggagacagaccctttggtgatgaaataaaccagtgacttcagagcctatggtctcaactgtgcttgaaaaacactgtctctgaaaacaactttgtgattctccctgctccctgtggacaaaagcacataattctgctgttacgggtactttgctcatacgagctttcatgttcagcatgcaatggaatcatgcttgtccatgtgaaataaatatggctctctcgtgtccttaatgctgggcttttctctgtaagctggttctgcagcacaattcattaattaaacttctcccagtgcaagaaggcagctggtgctgggggtggtctggggggtcagggaggagggcaaggactacatggggcagaggcaaggcggtggtggagatgaggaaagaagttcttcttggcagaagctggggcagaaagatcacatgagatctgtggggacaccctctatctgaaacataagtctgtgttcattctctgcttagaaattttagatctgaagtgctacactgaaggtccgaaggttgatggggcatcagatatctttttggttggccagcatgatattttgaaataactgtcaacagttagaaactgggagcattcatatgtaaaaaatatggattttcagcttcttcttaaaaaaaaaaaaaaaacaagagagacttggctacactgagcctgccctgcagcatggcaacaattggctgctgcctttggatggggcctgmgctccccagttttacaactccccatgtaggcaccctcccttgctgatttgtgccatttgccaggctcctgtaggcatttgagttcccagccctgccttgactgtgtctcataacttcctgtaaagcccaaatcctcccgcatggcacccaagatgaccccaacttacagtttctccttcatcctctgctctaaccttacagaatgatgtgccttttcttgagtttttcaagtctccttcacctggaatgcttccttccttcacctggaatgctttcttccctgacacgtctccagctaatggaaacccatgctcccagtaagacttcactcaagtgtcgtttgcttgatatttttgaagccttctccagctaagctatctgctcactcttctgttcacttgggagcttgtacatgactcaatggcagcttttgtcacactagattataattatttgtgtaaatgtctgcctccatcatagatttgaactcctcgagagtcaggactgtatcttgctaagttgtagtaggcacatagcagatgtctgatggttgaatgtgtgagagggtggatggatgttggaagtctgggttcgtggatgagggtgtcccaaggaactgcatttctgggggatgcttcccagatacctccatgtgtccataggaagcaaggaaggattgctgaacatctggggactgcttggattttgtgtgctctgtcaggcacagtagaaactccctgaagatcagattgacttataagggtggaagacactaaagtgtaatacaacaattctgcatcatggcccatcttccttacccaagcatcttacatggaatcaaatgactggatccatggcatcaagaaatcagttctgcaggtctgcctctgtgcttcccctgtggatctggagaagtgacagggtagaagccgttcctgctttgaagttggggccctggccgtctggtgatcagaaaaagggcagattgtatatgtgcattaattaattgcccttatacatttcccatccagaagtatttggtgttctgtaactctgggccttataggggccaaagccatatccaatgggagacagaagtgcattgagacacaaaggaatcacctaagaaagagtcaatgaaatttgcttgtttattctgaagagatcagtcagaattcatgaaaattttgaatttttcaattttttgcacataaatgcagctttattcctttgcatgacaagcacattcagactgcccggactaagtaaatttcaagtattaatgaataggtatgagtctcttgtaattagcatctcaatcattgtrtgcaaatgaaagatgcttaaaaatcctagtttaaatgagtaaaatctgkagtacatgaatctgctcagcaaactctgatttttttaatccagtgcaaatggacccttttacccaggctgccccagggcaaacttgcacaagttccaaattagtatgctttaaatagatgaagtttgagtgttcaatctgaactagaaaggctcctcagggtgtgwgwgtgtgtgtttggttaggttgctgaaacagacacaaaatggcagtgtcttaaaagactgaaatgtatttctctcttactaacagcccagagtggacggcagttccatgacaccagagactggagacccttgcatcctactacatctgcattccactcagcaggaagagggtgtagaaataaatgaagactatccaaaagagagcaagcagaggtcattgattcagagcttgccctagcaaagagtcttgcatttggcagaaactcacaggctggcagaacagtgaaaaaggttcacactggaaaagagagaaggcttcaggggtgcctgattggaggtagttggcgtaggaaagctggaagtgggctcattagaagtggggcatccggctgggtgcagcagctcacacctataatcccagcactttgggaggctaaggctggcagatcccttgagcctaggagtgcgagaccagcctgggcaacatggcaaaaccctgtctctatgaaaaaaaaacaaaagaaaagaaaaaatagctgggcattgtgctacactcctgtaatcccagctactccggaggctgaagcgggatgatcacctgagcccaaggaggttgaggctgcagtgagctgtgatcacaccactgcactgtaccctggacatctaaaaaaacaaaaacaaaaacaaaaaaaaggaaaaaacaaaacaaacaaaaaacaaaacaaacaaacaaaaaacgggcatcttatgtgattgattcagaggcatatgtgactttctgtagttgatcctgagttggaagcagggacaaaaaatggagaagctggcagttattgaccaagtcttgcccattctgggccagttgctgcagggattgtggtctggcttcccaagcgggttgctgaagaggttgtgggtcagagttctattgccattgttcgttggtacattcagtctcttaggaggaaaaatgggcccaggaagaacatgccttttccttttgaggttgtaacatcatttctactctcagcatcttcatattgtgaattgtgcctcctatggttgtgcaaaggtagtggtaccactttgacttacatcctcttgggtagaacatagttatttggtcacacttagatgtgagggaagctgggaaatgtaatctttaatctgggtgttactatgctgagctaaaaataggatattctgtaaaagaaggggagaacagatattgagggatatctagctgtcttggccacagaaccttttccacatagcaaagcctccaggtgcttctggttctctctgtggctttgtgtcaatatgtgagtatgcttctccacacatattggaatgtgtctgtacctgtttcagcccctgctttctttcccctgcctctgtctagggacaatatggtatagaagcaagcacaatttgctcagacccaataggtccaagtttgaatcccacctctgttattccctagctacatgaccttggggaaattatttaacttctttgagccaattttatcatcagtaaattgggacataaatttgtacccatgataaggggtttttgttgtgaagattaagcaagaaaacacttgcctcacacagagtaggcagtccattcatattccctttattcctggcagtggaatccaccactgctccaatactcctgttggctgagatcagctgcatctctaacagaactacagaattgctcatagcaatttccttcttcctatgaatgggtgaattaaatcactttcacagcccaggatcaagtggctcagtctaaatgctgagctccagattctctggccaaataaacctaatacctatgccccctaaggtaaggtgctcattcactctgattttcccagttcaggcccagtttatacctgttgtcctggcgtaattatcaacattgcctcttcgctctcaaccatgccccacttgggatggtaaatctctgggtgtccttattgtccctaaactctgacaccaacttattcctcctaaagggctaatcttcaagatttcatggccatctctttcttatcatccagttctcagctcaaatatctacccaaaacttgcccttcgtcttccccagtcactctctatcttgcaattcttatgtctattatagcatttatcactatctgacattatatattagtttacttgtttgatatctgtttcctctagaggtctgggagctacatgagagtggggattgtgcccatgtttttcagcatagtgcctgaaaattaagcataattattaagcataaatacttaataattatttgagtacatgaatgaacttctggggctctctaacctgaatgttagcctttttgatcattgcttaaccacaagaatagaccctgttcctcggctctattttctgcctgagatccctcaggtctcttgggatctttattgccatcattagcctttgtgagagttagaaaaaggcactcctcattggcagataaatgagaaaaggtgcgtctttggggtggacacagtgttttgagtatacagcatggcgaatggagtacagattggatatcagcccccactctgccccccaacccccaggtggcatctttttgtaaggcacaaactgcagtcttgcatggcagccttgtctgcagttcctccccattcactgggattccatgtccctgaatgctccagaaattagcactggatacttctgcctttggacatccaagactctttctatttttctagctctgcctttcaggagcttctccaattctgctggtatcctgatccttagtgattcctcatactccacattcagtccttttggtatgcacatgtgtgtctctccatggatgcatacttatgtgtgggtttgtgtcttcttttgtgtatgtgtctctttattatatcctcataaacacttattaacactcaaaactattcaacaaaaatttactgaatgtgtgcaaaaggggagtacagatgtaatgacagctaacatttattcagtgctttttgtatgccagcgattgtgttttccgtatcttataataactctgtaaggcaagtactatttcaaagtgtagcaaaagtaaaagcactggttgtggtggttaagagcatggatgcctaagttctaaccctagcttactactctcttactctgggatcttaggcaagttattttatgttcttgtaccagtttccccatctataaaacaggggtattaagaattgtaccaatatcataatggtttcatgaggattcaacaaatttaattcatatgaagtgtttggaatcacactcaaacgtgatagctgatattgatgctctcttcattttgagatgagaaaagtaaggcttaaaaaaagtaaagaaaatgtctaaagttctcacacctggtagagccaggagtcaaatcaggctctagtctcaaggccacacccttgattgccacagtatgagcactatcctggagcaagtcacataggagacacatgagacagtgagcaaagtgctataattgaagcaatgcaagaatttaaggtcatataaacgaggagaacaacacagaatcagcaagaacttcatgaagaaggccatggagcaccttcctactcttctcccacttatgataaatctcttaacctcttagatgaagttcagcttgttacccacacaatggatgagtttggtagcttggccagtgacagcccaatgaccacaaccaagaggggtttaacaaggtggtttttattacttgcaacaagtacaaagaacaccagggatagtttccaaagcagtggccccttgagctggggctgggtcaggttttataagcatagggtaatgaggtgcaatctgattggatcttgaaatgaagtgatgtcaggaggcctgatctgactgggtcctgccatgaggtgac
